United States Patent Application Publication US 2013/0157873 A1 - sequence listing, part 2

SEQ ID NO: 2 - DNA, 490863 bp, Canine spp.
  misc_feature: canFam2_dna range=chr8:31735206-32226068
  misc_feature (25655)..(25739): n is a, c, g, or t
  misc_feature (360338)..(360454): n is a, c, g, or t
  misc_feature (402525)..(402543): n is a, c, g, or t
  misc_feature (432780)..(432944): n is a, c, g, or t
agtttcagtcactcaagatgaaaacgtttagagatctgttgtacaacaatgtgcatggtgaacaatactatattataatttacaaattaagagggtaaatttatgttatgtatttttgccacaataaaaaaaaggaaatgaggcaataatgtaaggagccaacactctggtacataatatcgtacactgccacatgaatcctcaaagaataataggagctaaatgaataaactataatggcatccttctaattacttatagaaaacagtaggtttaatttaattcaactgtcttgaatctgagacagagagctatcccatgttactatctcatgtacaaacaaaaaaacttttcagataaattatatatttatctatttttaaacagtttatcagatatttgcacttgaggagtcttcttggtattcaaacaagactttccctctaccagaataaactgaacccaatatagggaaaaccatcagcatccaaaatatccttgctattagccaataggacaataaccgaatcatcttcccatatgttttcattgttggaaaccttaagaatgcatctagaataattccatacctgtcagaatgtcacttaaccaattcaagactgaaactcacttaaaaaatatatagaacagagtaagaaatactaacccaaagtaaactatgactaagttgtaggtaaaaacttgtatgaggtaattaaacttaccttgtaagaggtgattaaacttaggtactaactttcaggatgtctctatccacttctagcttactataccatctaaaggcataagccaggaaaatcaaatcttgttctaagagatgttttctatcatgatggttggccttactttgttttttaatccccactgaattcttctggaacaaaaacaaccccaaatactgatgcagccaaatgtttaaagcaccaaaatataaaagtgaccaaactggctcagaaccttttatcatctccccattcccgaaagggtaggtcttagctatcccaccaagagcctcagagaacttttcatcaaggcttacctcccttttctgttctttgcattcatttactctattctgatgtggataaatccgttaacctgtgtttttggactgccaggcctttctaggctgacaccaaggtttagattttcagcctggctttcaaatctggaactgatcttcagttctgcctttcagatctttcttggctccaccctatacccatgtgtctagccaggattctggaacctctctacctgaattctacatgtcagttctccagttgtctaaagaaaataagacgcttagttaataatttgctgatgcagcattttatgacagtgttgaaacaaattccaatgtagaaggaatttggactgctaaattaatattccttttgggtgaacagtggcttagagcacggtcaccctacattgtacagttctaggagtaccattcaccttgtttctaaaatgtatgtattatgctaagtgaaataaagtcaatcagagaaagagaattatcatatggtctcactcacatgtggaatataagaaatagtgcagagaactatatggggaaaactgaatgagaataaatcagagagggagacaaaccatgagagactgactcttaactgagaaacaaaccgagagctgctgaaggggaggtcggtggagggatggggtaactgggtgatgggcattaagggggcatgtgatgtgatgagcactggctgttacatgcaactaattgaattactgacaactacacctggaattaatgacatactctgcctctctgtgtgttctctctcctgaataaataaaataaaatatttataaataaataaataaataaataaattttaaaacgtatgtttcaggggctgccattggcatagttacaatataaatggtatacagtatacactactttccaaggaagccacagttaattgaatatcaagtcattatgaagtcttcaaaggtttttttttgcttattttttaagatttattcatgagagacagagagagagagaggcacaaacacaggcagagggagaagcaggctccatgcagggaagcctgatgtgggactcgatcccgggtctccaggatcacaccctgggctgaaggcggcgccaaactgctgagccacccgggctgcccgtcttcaaaatttttaactttaaaactagtattacataattcctaataaatatgcacaatgaaataatatcagaaatattgccctcctcattatcttaaaaacaaacaatagttttaaaacaaagccaaacaaagttaatgagcagaaactttaggaaagggacacaacttcaagccagaaagcagcagccaaaaaaggaactgaagatttttagtaaagcttgggatgagttctactgctgcccctcatggtaaaagcagtactggtgagtagacaaaatcctgataattctttgtgggttttttgtttggttggtttttggttttgtttttttagagaaagagagacagcacttgagtgaggcagtgcaggatgagggggtgaggcagaggaaaagggagagagaatcccaagcaggctctaccctcagcatgagcctgacccaggactcaatcccacaaccctgagatcatagagggagacaaaccatgagagactgactcttaactgagaaacaaaccgagggctgctgaaggggaggtgggtggagggatggggtaactgggtgatgggcattagagtcagacgcttaactgactgagccacccagatgcccaaaaatcctgagaattcttaataatattttggtactggggaaaaaagaaatgactggagagtactgagagtggtgaactgaacagtgagcacatctctctctctctctctctctgtctctctctctcagggctctatgctgaaatgggagatcaaactaattcaaggaatgttcttgaattaaacacataccagcagaggtgcttccattgtcttaataaattgatgaatattcaatgtagtcagtggctgttccatcagtgttcttctacattgcagagtcaaatccaagacttgtttacaatgaaaaaagtagagatgtgcattttctatatcctcattgctacaaattaaaaattagggagaaattcacttgaagaaattcaatgtgttatctttctaccatccagaaagacatagtgccaaaaatctttaaatctcatgcttttgaattagtttcagtaaaaatctaaagcaataaaacaaaagaaaaaggacttaagcaaaaaagatacaaatagttttacagttgtataagcaatttttttcctaaactttttgatgtggtagcttctaaattaggtaacaggtccacataaattgttttttaaataaaagactgtcaccttgaggacaaggagattatcttcgaatatagttgcttttctagagctatgctaaataaagccttgtaacacaaattttctaggtttaatttaaactcaaatctgttttgaataaacttcagccaaaatatgccttaagatagaaaccatgtgacagtttgtgggagtttgtgagtttgtatctgaaatattacaaaactcagcaaatatgccttataatttgagttctggcatcccttcaatatgagaattcaaaggtaaacttatagtgggtgagtaaggtttgccaaaattaaaatagcaatttaaaaatctccatatggcattagcagggcttggcaaaacactgcaaatttttatttttaaaatgttattttaattcttgatacacgctcaaactgagatctaaggttcgctgagttcaaatttaattacaaactaatttctattagatttaatgactaaagaaacaatcaaagattacttaaagcctactcgtgttaggccctgtaccaaatataaaagacttagatgaatcagatgatttaaatcctcaaggggcttagactaagcgagaggagtttagttgttgttttttttcttttttaatgtagtttgtaagtgctataaaatgaaaagtactaggagaaacaaatatttcattccgcctcaagtcagagaggaaaaaggaaagggaagggaagagcacagagattaaaaaccgtaaaggagagaatgacttctccaagaagataaaacaaatgggtacttcagacaaagaactatatagccaagacctaatcaaagtatgtaactttttaaagagagtcctaaatagtcacatttattgaaagcaagagaactcagctgaggttgaacctctatgataccataaactctgaaataataaagtaattttggaaagctatttaatcagagatcattggtataggtaaaagaaaccaaaaaggtgagaggggtgcttactgaagtgtggaagtacatatcacagaacatgagaaaaattcaagtaactgaatcagagaataaatgcatatatctgaacacaagagttcaagggaccttcattgttgttaatacttttcagctcctaactctttttattaagatgattctctgctttacttctacatggccaaaacattcctatgagcaagagagacaaaacactatataatcctatttttccatgaccaattccaagttcctgagagaggggaattcatctgctcaggtaagccaatgggccggttgaccctacatcaggtggccacctctgatctaactgacggtaatatatatggggtgagggggtaacatcctggtctatacacagggagatgtaacagaaagcactggtgtcctcatggcatgccacctcttatactactacttatcatattcactgtccttaaccaacatagaacttcaaacaaattcaggcccaacatgatgtaattattagtatactagacttatctagtgctacagctccagcaattggaatagtgtctagtacatacagggcattcaataaatatttattgaataaaagaatgaacaaataaaaaaatacattcacctcttctcctttaggagtgaacccaaagttatagccaactacttcatccagaagtcatgccataggactattgtactctaaatccacactccctccctgtcatatccagtctaggtatgactcctcactatcttgccatccatatataaatgagtactgaaacatctccaatgtatcaaatactcaaaggtacatcaaaaaggagagtaactggacatttaaaaattctcattttaaaaacagggggaaacaaaaaaaaaaaaaaaagaatccccatgagatgagaataacaaggcttccaccattctgggatggggaactggcagtcaacactgggagtagcaaagtagctggctaaaccactgctaattgcatcttgagactcaagtgacttatggcaaagctttgtggtattgtcagcataagtctcaaactgttaaaaatattaatttttatacaaacagtaatcatgcatcaaagttttatctaattcattaatgaggtaatcagcagaataacacttcaatcagaagagtctaatgaaaaaaggaatgctggctgttatatagagcagtaaaaacataacttctctttgcaactttattctctgcctacccactcctcccaaaaaatcatttcactttatcagttttttatgcaccaacttctaaatatacagagttgtaaaaggtctgggatttaattaattgtgtgtggtatatcaaatagtcattgttttccaagagggtagcaggagggctcattaaacactcttgcatggtataaaaaggtcacaatcaccattttgtgttgctttgtattaattttcctgaagagcattttgaggcaaagtctttaaaataaaatggtattccctgcctttataaatgctaaaggaaagaaaaactttaatcctaggcttcccaggcaaaaaaaatcaaaagaagccctctacctaaaattgtaagctagaaactagacaagaaaaataaacatttaaaacatccttctctgtactttgatatatttaagattattccaacaaagtaacctacagaactctcagaaagaacttctgtagtctagttatgaaagctgttattttatcccctaacggatcactatgagagatctattcctaaaatacacttgggccactcatgggatcacatactgtggcttctccatattgtttttgttcactttagcctaacatcacctctgtacgtgtaaattcattttcagactgtagaatggcagacaataacaaaggggatttccagtttcattgatatattcacatctgcttacaattcctctcaggtaactccatgatgtgagagtctgatggagatgttgaagaagtcatgtgacagaagcaaacttagaatcattgacatatatgcctcttgtacatacccaatactttccaaaagggcagtttccgtggttaggacaaactggtatgtggtcccatacacaaaagcagcttccatgactgctctgtgctctgaagaagagataagagagttgggagacacatggagataatgtgtgtgactctcttttgaatattgccctacatcctttcagcctctattataaagaaaaattccttgtagggatcccatctggggaatgcaggcagttaaagaaattatgaaaagtctataccattcaaagaaagagaagagctaagaggaaatagaaatgagttatacttgaggatataacatataataaatctgtgagggtttcctcctcatagcaggggtgaaattatgcatccaccttccaatttttttactatattttatatatgtatgtgccttattgtttgtggcttggttttcttttaatcaaatttagtcttatacatagctttaaaaaaattctacaaaacatattaagaaaaacaacaatttctcccccatttccaattcccaagggacagctgctttcaattcttttactgtttcttttggtatttgccttcctttgatattatccattgacattcttacactcttttttcctgatttttttttttttaagattttatttattagagagagaaagagaaaacaagcagtagggaagggcagagggagaagcaggctccccgcctgggatcatgacctgagctgaaggcagatgcttaactgactgagccacccaggtgcctctatttccagatttttaaaggtgttattaatatatctattgatgccccactatggcagatgagaatttagctctttcccaaaacctcatctcacaaacatacacacttctatcccctcaataatcccaatagttgatttttattacaattacctgcattgagattgttataactcagtaaatactatttacaagtgagccatacagtacaaaatgagtatttatccttttttgagcaactttctttttttttcaccagttataactttttaattacttaaacttatttctaatttatttctaaattcttccagtactggctaacgctctccatacttcaaacagatcaggcacattattagctcccccttcttggaaaccttcctgcagagcctatggacttgctgcagtatggatgactgcaacatgacccgctaaacaacttttatcctgggaactcgctacccacatcatcatcatcatcctagggactctcttactcttttctcttgtgttgggtcctttggcctgttgccatccacatcttcttgactgatttgctccaattttctagcaccttcttatgagaggatatatgaaatacacatgttctgcaatcctatacttctgaaagtgtctttattttctattgtaactaactatagttgtctgcatattgaattctatgttcaagtcatttccctctgagaatcttgaaagcattgttccattttcttcattttctaggactgcaactgagaagtccaatgtgattttgattcttgatcctttaactgtatactctttctgtaagattttagaacagtgtttgttcccactatgctgaaattgcaaactgagatgctttgatgtggctctaagttcccccattatgctgggattcagtaagccctcttaatttggaagctcaacttcttcagttctgggaaattttctcaaagtatttacttgaagtatttcttcctttccattttattttcccttttctcctcactgccatttggagacagtcaccttcccctccctgactggatcttctaccacaagagtttcatcacagtatcccacttaccattctgacttagggttatcaaccacctcagccaaaaacaatccttctcattccacaaagaaatttagcttttgtcacactgtcattctctccaatactgctacctcataatccttcatgattttattatctccataggtgatacttgcaaatcctagcctctcagtctttggtcctctctagagactccagtgatctctcttcaagtctactttaaacaatcgctgctgtggtcccacaccaagccttgtcattaccaatcacttgcaaacccctccaaaatctcaatgtctagcatccccccaaccccctccttccataaacacacacacccctccatctccaggtcactctgtctagcacataatcctccaggaactatggtcctatcattttcacagtccttcattccttcaaattttctcctccgtcttaacccagcttacattccatagttagtcttccctgcctgtctggctaaaacacaatccatgttaaatcagatattctgcttattctgtacttacactcataaaagtaaatgtggctggagggaaaaaaaataacaaaaacaaaaacctgttagcatcaccacactaatgatctcactttattttttatttatttatttgagagagatagagagagtgcacatgtgaacagaggaaggagcagagggagaggatctcaagaagactccgcacctatgccaagcacgatcctacaaccctgatatcatgatctgagccaaaatctagggtctgacacttaacatactggctcacacagatgcctcatgatttcactttagattactgatatcaactattattgttgcctggcaaccattctcttttaagattttatttacttattttagagaacacaagtggggggaggggcagaaggggagaaagaatcttaagcagactccccactgattgcagagccctacacggggctcgatctcagcacactgggatcataaacctgagctgaaatcaatggtcagatgcttaactggactgagccacccagatgccgcaaccattctttattttcaggcctcctaaaacaactgtttcatctcttctttcctcaagctgattttatttttatttcactgagaaaacatagccaattaaaaaagcaaaaccaaaaaaactcccacaagcatatttatctacccacttagcaaaactgatgtccatattctttgtcttccctccttttaccatagatgaattttctgtgttcccagcaaagaaccacaccttccctcattcactagattccatcccctcttatctacattgttccagcaattctccccgctttttcctccatgctgtagtttccgctttctactggatctttcttgtcaacatataaatatgcttcttaagaaattcttcacttgaggcacctggatagcttagtggttgagcgtctgcctttggctcaggtcatgaccccggggtcctgggatcaagtcctgcactggactccgcaggaggaacctgcttctccctctgactatgtctctgcctctcattctgtgtgtctttcatgaataaataaaatctttaaaaaaaaaagaaagaaagaaattcttcacttgacccacatactcttccagccactgccccattttctccttcccttaatagcaaaactttctctaatgaatctccgtatttacagtctctagttgctctctattctcttgtacccctatcaggcatttaccccaccactctacagaaactgtgcttgtcaaggtcaacaacaaattccatagggctaagtataatgaggccaagtggcagctattatcttcattaacctttcagcatcatttgacacaactgttcctaactcttccttaaaaccctatcttcatttgacttgcaggacatccctaccacacagtccattccttctgtctcttttttggttctatctaacttcagtaacctgtaaatgttgatggatctgaacagttcagtcttctctttgccatctaacatcacttcctttgtcatctcttctggtctcacagctttatcacacaaatttataactctaatctgtatctccaccatcaaatgcagactagtaatatccaactaccttactatggtaccatgaggaccataaggaaataaaaatagtaactgacacaggacactcctatatgtcgggaactattttaattatttgaattcatttggtcctcacggtaacactaagaggtaggcatagttattttcaccaatcttactgattaggaaactaaagttccataagttgtataaggtcatattgtaagtcatagaggcagggtgtctaacctaggcagtctgggctccagggtttttgttcaatcagtatactatgctgcttgcttaaagaaaaaaaacatattggtatggatgctattttaagtcctgcaacatactgagacaagtgcagaggcacaacaaagattaagagaaaagttaaatacctggtgttccaatggctcttacgtaggcgaatgcaatgttggcttttcctttcagagcattttctatgttctgcaggtcttccagggtggtaatatattttacttcattaaaaagaagagcactgaaataaacagagatgtaattggtaaaagaatctgatacatagttatttaatatgtgttttcagtaagttaaagatcctaataaaaaaaaacttttttttaagattttatttatttattcatgagaaacacagagagagagaggcagagacacaggcagagggagaagcaggctccatgcagggagcccgaagcgggtctcgatcccgggactccaggatcacactccaggccgaaggcaggcgctaaaccactgagccacccagggatcccaaaaaaataaacttttttgaacaaattatcagtagttagaacctaagtattttaatactgaattaaaaatcactctctcaattattggtctgtccctgagaatatcaaacaggaacagtcatgagaaatgatgctccttctccacaagcatcttaatgtatttaagttgtattcactaacatcctactctggcccagtaatccctgacacactctcagcctggagcacatttgagccatttacacatctaaactgaaggcttctttctatggcatataaggctctgcataacctacttctccaactccattttgtgttatgttcatttcaccatactttaggcacacctcaggcctttgcacacacagttctctttgctgaaaactattctctttgctacttctcatgtatctggtctcagtttaaacattgctgcctcagagaaacctaacctctcagtcctatgtaattaggtctgtaccatttttctcttttatttcacactatttgatcctttgtagcacttatcacaatttataattgcttatatatttatttacttgtttatctctgcatctcttattaaactgttaccttcctgagagaggccttgcatattttatcactaaatccataataatttagaatagagcctagtatactataaataatcaataaatatttgttgaatgaattaaagaaaaagcagggtgggtattatttattcctagtcatttgaagaaatgcaaatccaaaacagaagagcttactcactcaaaaatacatttacagaattaggagccaggaacagaacataaaacaggtctcttcattcctaattcagtgacctttcatttaaccataaatcttccaaaacatcttttcaatgtgtagataaattattcatatttcttcatctaaaagaatttactttttaaattttctacttctacataatctatccctaacaactcattccacttaatccctacatgcatgcatgcacgtgtgtgtgtgtgtgtgtgtgtgtgtgcacacatgcatatctatatttttgttaggcttaacttttaaggatttttaaaacctgtttcaagtccatgtacttaaataatcaaactatctccaataaactcatcaactatagttttctcttatggaaaatatggcattttctgagaacacaacagttctcaaactttttaatctcagaatccttttgtacttttaaaaatcactgagctcctcgaagagcttttgtttatgtaattatagttaccaaaatagaaattaaaagtataatttagaaatatttgttaattcttttaaaaataataataaacaccactgcgtattaatactctatttaaaaataactaaattttccaaaacagtcataagagtggcattgttttatacttttgcaaatctctttaatacttggaatatacagaaaacagctggattctcatatttgcttcttcattcaatctgttgtaacatcacacaacatatcatatagcctctagaaactaaattcataagagaatgaaaatgaaaaaggcaaatgtcttagcattattaatacactataatgacttcatgggtaccccgaaataggtgccttaaattacactggtttacatagttacctatacattatagatttctttaagttttttaaaagaaatgtaaaacttaatcttctgtaattcccagggctcttgttttgtttttaaaagcaatacttactgagcagtacccactatttgctagatattttcacatgttttcatttaaatcttcagtgttattatttaaatattttttatgaaaaccgtaaatgctattttaaacatttttgtttacaaaaaaaatcaattattagtatctttttacactctcagattccttaatatggacaaatttcagaggaaggaaagaattctcaagaaatttaagatagactgtcctgaaagttgtggggcagggtttttgttaggttttatttcatttttgtttttaagacacaagctaaaaggtcaagtctctgggtgatatcccccttatagtttcagtcaaggagtgtatcagagcacagaccaggagaccccagcctggtgttgactggttgcctcagctatcccacatatttggtattgctcgggttgagattaactgggacaatcacacttcacatctccttgctggctgctggaggcaggtactggatccatactcattgatgaccaccagagctcccttcaatgtggctcagtttgtaaccaacatagtattccagggcaaacaaggcagccatctgatgcatgatccatttctgcttttgcttcctgcgctgcatgacaaagtactgtctgagctgcctgaggctggctgggaaacacttccaggagagaatacaccaggactatgatgaggaaggagaagatgtgggccatggtgcctatgacccacctgtggatctgcagtgttctcagcatgctcactgctggggaaagtaaagtcacagtagccagttgatgggtgccatcaagttgcctctccctgctatcagtaaccatgatggccagattggcgagaagccccaggtcactgcggttgtcacagctgagagtggataaacgctggtggactcggccccatcctcacataggggaaaggtatacacagcagctaggacatcctcatcctgcacatactcctggttggcacactgcacgtggctattgtagcacccctggaagctgctgagccatgagccagcctgcacacattgtgcccatagtcccacaggttcctggccaggatgatgctcatcaatgattgccaagagttgaggatccagggctcgatgtaggtgaggcagttggagtccagctgcagaaactgaaggtgcagcatggtctcgaacacatggggctccatgtacttgatcttagtgtccaacagatccattttctccaggtttcaaacccagtccaatagctaaccacaatggccaccttgtgcctctttaggtagagggagtgcagggagatgaggtacagaagagggcaaagttcaccttgaccaagtctttgtgctccaggtgtggctcagtgcacaccacacttttttgttttttcacaccagacttttgagctgactgtatccaatctaaatattctttattatacacacacgaaacagtctgaggaattaaatgacgtgtccagatcatagtggtagtcacaggtagagctgagattcaaatccggtcttccaacactaatgtcagaacttttctaaactatgtttattactgaccacgcaaaaatgggaaaccaggtaaaaatggaggcaactaatgaatggcaagggaatcttggtggcaatctggattgttgctgcttatacattttggctaccttgtctagaatttcccttgaaatatttcaatccagacagagatgccatccagtgaactcaaattagactaccatgtaaattcgaggcttgaaaattacatttgcccatttacctttattgctctagcagctctaatctatttgcttcaaaaatcatttctgggaatagaaatctccctaaacttgtttctcaataaaactggcaaatataaattaacaaaagctaacattttgggggtacctcccacatatcaggcatagtactaagcactccatggtagtggtaattttatcagtttggggactgcccagctctgaactcttctcttttgctttggagatttccagttttctatgtcttcacagtgagcagagcctaagtcccctcataaaagctaaaatataaacttgctcttctaggctccctgctgcaaggcatggccatatgacccagaatcacttgcctgacattctggatcaggagccagtgatgtaagaataagggacagtacagaattatttcaagaagcggtagagcaatagtcagctttaaaagcaggaatgacagcagtgtcaataacagccccagaacaggtgatgcaagctgtggcatctgaccctcagcagtaatgcaacagtcaccccagactggctatgtgttatgcttttgactataatttagaactgtattaattctgagtccagttctctagccattctatcgagcctgagatttcctatatccactccaaatccttttctgcttaagccactcagacccagattttgaggcttataactaaaaacactcagaaaggcactcagtcttgcttaattttcattgcaaccatctgagatcagtactatcattaactccattttagagataaggtcatggggctcagagaggttaccctgcctaatgtcccaaagctcattaagtagtcattatccatgaggtaataataaccaaacctaatgacattcataatctaatgatctccatgattgttcccagtggcttcctaactttaatacattttttatgttaatttctagaatatggggacatctaaggatccctaggatccattctcaggcctgtgctccttcagtcacaaagaggaaaattactgacagaaatgggtaaaaggaaaagtctgtcttggcattttcttgtttaatgatggggtgaaagagcctggggctgctctgacctgggagctcttcttgccctagaaaggcttttcttttccttggcatgcttttcctgagatcttcctatcaccatcattataatattgcccagacctgaatgggtatccaagaaagaaagaaagaaagaaagaaagaaagaaagaaagaaaagaaaagaaaggaaaagaaagaacgaacaaacctgaaaagtctatttgaccctgcttttggagcagcagactgttctgcctttaaaaaaaagaaagaaagaaaagaaaagaaaagaaaaggaatgaaaagaaaagaaaaagaaaaagaaaaagaaaaagaaaaagaaaaagaaaaagaaaaagaaaaagaaaaagaaaaagaaaagaaaagaaaagaaaagaaaagaaaagaaaagatttgaccctactttagaagcaacgaaactgatctagctttagaaaaagaaaaagaaaaagaaaaacaatttgaacatgtatatgacaatcattattccaagaaaaagaaaaagaaacagaaaaagaaaacgaaaaagaaaaagaaaaagaaaaagaaaaagaaatagacaccgaaaaacagatgttgaccctcgattttgccataccaaatccccatgacaaagaaaaagaaaaagaaaaagaaaaagaaaaagaaaaagaaaaagaaaaagaaagaacgaacctgaaaagtctatttgaccctgcttttggagcagcaggctgttctgcctttaaaaaaaaaaaaaaaaaaaaaaagactatttttacattttgtttctgtcattattcctaaaaagaagaaggagaaaaaaaaaaaaaagaagaagaagaaggaggaggaggaggaggaggaggaggaggagaaaggaaatgttaaccatctattttgccataccaaatccccatgacaaaaaaaaaaaaaaaaaaaatgttttttgaaagaaagaaaaaaacagagaggggagaggaaggagggaaacaacacattttcgaaattaatatggctaaaataacaaacagaagccacctttaaaatataaagggagagtacaagtcataacaaattcacaaatactggtcttgttcttactgccatacattgtatattctactagcttattccttatgaaattttatcaccagaaacaatcttgcaggatttctgctccttccatttttaacaaccaaaaggtgaagtttccaaattcattcatccatcaatccagtattttatgaacacctaatacatgccatgcatggtgttatgcactgatataaggacttggaggaaagggcactgtttggggaaatacatctaccagttaacatagggctatgaggaattcaaatgcaagacaagtaattttttattaaatttcccagtaaaaagtatgtcaaacaggaacccacctgacaatattaaccataaacaaacttgacacagatgaaagaataagcaatagtccaaatctattgagaaaagaccaacatgggcacagcttaggatcttagaagaagacatttctaaaagcagctttctccagaggttctatataggttctaggtcatatcatctttagactcaatagcctggcttggcaataatatgttgaagaataaaatattagcagaaattatgatagttgaaaataattcctataatatttgaagttcacaacattttaggtaggatgttaatttaaagggaaagaaaccattttgtgacaaaacaccgtcacaagaataccaagtaccacatttttttttccaagtaccacattttaatgaagagttaatgatatttcattgtttcttatagtacagataatctttcctttttgcatcatttcatggtttttaggaatcaacaatgagtataagaatggcctttctttgcaactgctacctcatggcaaacatcacagcaactatcacagcatgaactaaaatgaactcacttctgttggcactgtgtatgaaacagaaccacaggtagatacctgaatttggattccttttttttttttttttccataattgcaaaaggagacttcctgcttttacacagagaaaagcaattaacacttgtggagtagtgggtaaaacccacaatttattttcacaggcattaccttatttgatcttcacaacaacctcaagaggttgcaattgtaacatttaaaaatgaggaaaactagcaatcagaagagataaattgttcagatcacactatgggaaataaggaacagggactcaaatcctcaggaaatcctgatttcttcatatatcatacaactttctaatccacatttgagattatagtgccttaatctcctatacttctacctgacctgcctcaccctggttagatatatgatactctcaatcaacaaataaagattagttgctattttaactttctaagtattaccttttttcatctagaatctgggagtaaaattttcctcatatagttatcaaaccactcaattctactagttttgaccatgtaaatttttggaaacaggacaaagaacttttagactataaatcccaattctcacttttaaattttatttattttgcaaatttgtaacactttccatatgcttcaaaacacaaggtacaagagttgaagagttaagagtctacccagcttccccattccattctgataaagaagtattatcagtttcctgtgaaccttgaatatgtatactacatacatataagccacaaacatgtatttatatatgcctctgttagaagacaatcctccctggatatttccatgttcctacacagtccacgcctccaaaagatgaaacctggcatgacataacattggagactatctcctctgcaccttctaagcttgtctcctttccactgaagccatcaactcccattcaagaagcaataaaacctttcctatcttccctggggccaaagagttaaatttagggacagagaccttctgttcctatcctagaaagaatttgtttaccagagaaaaagataaactgagcactctacctccagaaagaaagattagatatgtcagctcccataaaagcttagagattactaatttctgggttctctttctccaaaccttgcctatagtccaggtatacacatatggctcttactttgttgctctgaggagaactggataagagggatctagtactaccacgctaccttggctgctgtcactgctgtgtggtctgacttctgattcagagccctggggcttctgcaattatatatacaagtagggtaatatcagagacccttcagagatctagacataacacctgatgtcttatatacatggtgctgtactatattttaaacacttggtttattccatttaatatatcctgaaaaataatgcaagaaaaaaatttttttagagagaaagagaaaacacacatgcatgagttgggatgaggagagggagagagagaatcttaagcaggctccacacccagcacagagcctgactcagggcttcatctcatgaccctgaggtcatgacctgagctgaaatcaatagtcagaagcttaactgactaaaccacccaggtgacccaatgtaagaaaatgttaatagaccagtaagtccgtatattcttgatcaatgatattttaggaatactttaaatatcttaaccaaaaaacacttcttaactggccataatggtccaaaattagataattctttaaatattttgtgtaaagcttaatctaactttatatgttattctattattaaatttttactaacttaatcttttttccaaatgcaattttcctatattcagagaataaatgttagctaaaacctgatcttttctgttgccaaagaagcaaagttcaaatataattgcagatcactgatctcaatgaaaacattctacataaagaacaaattcaaatgctttgaagaaaaaaataatagcatgcgtttacgcatttttaaaaagcaagccaaataaagcaatataaatattctaaagtgcaagttttaagaacatatacaagtattttgggaaatataaaaacaatccaagtattatctacaaatagttcttcttaattataagactaagaagtggatttaggtaacaaatatctgacaagttaattgaaattaacatatttgaataaatgtcagtaagttttggctcatcagtttattacctaataaaatactgaacttaaacttagaagaattatttatatataactatattatatacaatataatatatatacagctctctctatatatttaatatcagataatggtgtcttagaaaaaagataaacattttatgtatatatttaacataaaataacaatgttttaggaaaaaacttaaggatataaacaaaaatttaaaaaaataaataactgtttagttctgagtaatgggattatgaggacttttaggtgaggttttcatggctttctatatttctcatgcattctaaaatattctgttactataatctaactagtttgtttttccagtcttttttttattttttaagatcttatttactgggcagcccggatggctcagcggtttagcactgccttcaaccagggcgtgatcctggagtcccaggatcgggtcctacgtcgggctccctgtatggagcctgcttctccctctgcctgtgtctctgcctatctctctctctgtgtctcatgaataaataaataagatcttttaaaaaaatcttatttattcattcatgtgagacacagagagagaagcagagacacaggcagagggaggagcaggctttctgcagtagcctgatgcaggatcggagcccgggaccctgggatcatggcctgagccaaaggcagacactcgaccactgagcaatccaggcatcccatgttttgccagtcttcttaaaaataataaaaattttaaaaaataacactaataaaaattcagtaaggtcaaagggcataaacttaatacataaataatatacttctatcttttacatacacatattatacatacatatacacacataaaatatcaatatgtatattctagaagacaatgaaaaaaagaacccatttacaatagaaactaaagagataaaatatctagcaatacatttaagtgtccagtcataaattttgaaagcatgaaaactctactgcacccaggacaatttacacgtttaatgcaatccctatcaaaataccatggactttcttcagagagttagaacaaattattttaagatttgtgtggaatcagaaaagaccccgaatagccaggggaattttaaaaaagaaaaccatatctgggggcatcacaatgccatatttcaggttgtactacaaagctgtggtcatgaagacagtgtgatactggcacaaaaacagacacatagatcaatggaacagaacagagaatccagaagtggaccctcaactttatggtcaactaatattcgacaaagcaggaaagactatacactggaagaaagacagtcgcttcaataaatggtgctgggaaaattggacatccacatgcagaagaatgaaactagactactctcttgcaccatacagtaaaataaactcaaaatggatgaaagatctaaatgtgagacaagattccatccaaatcctagaggagaacacaggttacaccctttttgaacttggccacagtaacttcttgcaagatacatgcacgaaggcaaaagaaacaaaagcaaaaatgaactactgggacttcatcaagataagaagcttttgcacagcaaaggatacagtcaacaaaactaaaagacagcctacagaatgggagaagatatttgcaaatgatgtatcagataaagggctagtttccaagatctataaagaacttattaaactcaacaccaaagaaacaaacaatccaatcatgaaatgggcaaaagacatgaagagaaatcttacagagtaagacatagacatggccaacatgcacatgagaaaatgttctgcatcacttgccatcagggaaatacaaatcaaaaccacaatgagataccacctcataccagtgagcatggggaaaattaacaaggcaggaaaccacaatttttggagaggatgtggagaaaggggaaccctcttacactgttggtgggaatgtgaactggtgcagccactctggaaaactgtgtggaggttcctcaaacagttaaaaatagacctgccctacaaccctgcaattgcactgttggggatttaccccaaagatacagatgcaatgaaacgccaggacatctgcaccccgatgtttctagcagcaatgtccacaatagccaaactgtggaaggagcctcagtgtccatcgaaagatgaatggataaagaagatgtggtttatgtatacaatggaatattactcagccataagaaatgacaaatacccaccatttgcttcaacgtggatggaactggagggtattatgctgagtgaaataagtcaatcggagaaggacagacattatatggtctcattcatttggggaatataaataatagtgaaagggaatataagggaaaggagaagaaatgtgtgggaaataaaagaaagggagacagaacataaagactcctaactctgggaaacgaactaggggtggtggaaggggaggagggcgggggctgggagtgaatgagtgacggacactgagggaggcacttgacgggatgagcactgggtgttattttgtatgttggcaaattgaacaccagtaaaaaataaatttattataaaaaaataaaaaataaaaataaaactctactgcaggtcacaaaagaaaagctaatgtaaagacatcaggttctggaatggaaagattcattataaagatgtcaactgtccctaaaataatttataaatttaatgccagtaggatttagtcagggaggggaagaaaccaaacaagataattttaaatgtcatatgtaaacaaagcaaacaaacaattctgaagacagaaatatgaagggcctggacctttcagatattgtattataatgctttaataattacatatataaaatatatatatttaaatgaaacagtccaaaaatagacccaaatatacacacatgagagtttagtataaaaggtaatgtcttgaatagtgaagagattcactaatctcagttgtattgagacaactatatagccaactggataatatagagctaaatccattctttatactagttaaattccaaacatcaaagatttatgtttaaaactgaaactgttaaaacattgagaagaaatacatccacacaaatagaagctcatctttgacaaaggagcaaaagcaatttaatgaaggaaggatatctaaaacaactggacattcacatgcaaacaaatgaaattagacaccggctttatattttcacaataactcaaatgaatcatagatctaaatgtaaaacatacaactataaaatttacagaagataacatagaaaatcttggtgaccttgaatttggcaaagagtttttagatacaacacaaaaagcaaaatccatgaaagaaaaaattgtaagctggatttcattattattttttaaaaccctgctttgtaaaagacactgttaagaaaatgaaaaaaaaaaaaaaaaaccaagcctgagagaaaatatttgcaagatgtctaataaagaatgtgtattcaaaatatataaaagaaatcttaaatggcattgggaaaactagataactatatgcaaaagaataaaactggaccactatcttataccatgtaccaaaataaattcaaaatggattaaagtcttaatgtaagacctggaatcataaaactcctacaagaaaacataggcagtaagtctttgatctgtcttagaaatattttgggggactaatctcctcaggcaaaagcaacacaagctaaaataaacaaatgggattgtatcaaccataaagctttacacagcaaagaaaatcatcagcaaaaagaaaagacaacctactgaatgtaagaaggtcttagcaaattatacatctaacaagaagttaatatccaaaatatataaagaccttatacaacttaaaataaaaaaaaacaaataacccaattaaaaaatagggagaggacttgaatagacaattttccaaaaaagacatacagatggcaaacagatgcatgaaaagatgctcaatatcactaatcagcagagaaatgcaaatcaaaatgacaatatcacctcatacctgtcagattggctattatcaaaaagacaaaaaaaaaaaaaaaagtgctcctgaagatataaaggatcccttgtacactactggtgggaatgtaaattggttgcaaccactatggaaaactgtatggaggttcctcaaaaaattacaaacagaactaccatatgacctagcaattccatttctaggtatttatctgaaggaaacaaagacatcaaactgtaaaaatatatgcactcctatattcattgcattatttacaatagccaaaacacagaagcaacctaagtgtctatggatagatggattaaaaaaaagtgatacacacacaatacagtattactcaccacaaaatagaatgaaatcttaccatttgagataacatggatggacctagagtatattctgttaattgaaataagtcagagaaagacaaataccatatgatttcacttatatgtggaatctaaaaaacaaaagaacaaaacagactcaaagcaggaggggttgagggcaaaatagatgaggaggattaaaagtcaccaactcacagtaacttcttgcaagatacatccacgaaggcaaaagaaacaaaagcaaaaatgaactattgggacttcatcaagataagaagcttttgcacagcgaaggatacagtcaacaaaactcaaagacaacctacagaatgggagaagatatttgcaaatgacatatcagataaagggctagtttccaagatctataaagaacttattaaactcaacaccaaagaaacaaacaatccaatcatgaaatgggcaaaagacatgaacagaaatctcacagaggaagacatagacatggccaacaagcacatgagaaaatgctctgcatcacttgccatcagggaaatacaaatcaaaaccacaatgagataccacctcacaccagtgagaatggggaaaattaacaaggcaggaaacaacaaatgttggagaggatgcggagaaaagggaaccctcttacactgttggtgggaatgtgaactggtgcagccactctggaaaactgtgtggaggttcctcaaacagttaaaaatagacctgccctacgacccagcaattgcactgttggggatttaccccaaagatacagatgcaatgaaacgccgggacacctgcaccccgatgtttatagcagcaatggccacgatagccaaactgtggaaggagcctcggtgtccaacgaaagatgaatggataaagaagatgtggtttatatatacaatggaatattcctcagccattagaaatgacaaatacccaccatttgcttcaacgtggatggaactggagggtattatgctgagtgaagtaagtcagtcggagaaggacaaacattatatgttctcattcatttggggaatataaataatagtgaaagggaaatatagggaagggagaagaaatgtgtgggaaatatcagaaaaggagacagaaacgtaagactgctaactctgggnnnnnnnnnnnnnnnnnnnnnnnnnnnnnnnnnnnnnnnnnnnnnnnnnnnnnnnnnnnnnnnnnnnnnnnnnnnnnnnnnnnnngaacaccaataaaaaataaattaaaaaaaaaagtcaccaactcagagagggaggtaaaatggtagaagagtagaggatctcatttcatctggtctcttgaatttagctagataactattaaatcactctgaacacctgtgaattcaacctaagatataagaattcctggaattctacaaatagaaaagagactgctttttgcaaggtaggagtatggagaagagaaagaaagggggtatattggaagataaacagcagtggggagggagcctctgaaacttgactatcaaaaagtgatacagtcctagggtacaaaatcagaacctttagaaatcaactccagtgagagacctccctgtgtgaaaggtgctcagtggtaaagtggggcagaatcctaggtgacctcgggatccccggggtcacagagagaatgggggtgcctgagccagcagagttcccaatcactggagcaagaaacccttaacggtctggagcccaggagagagctctcagctgagtttgccataaacctcaactactgcatgatttggcaacagcactcagtgtggggggcatgaaggtgtcttgcgaaggacaaaaaaagtggcagccctctgccttccccggagtgggcaccaccaggcgactgctctgcatacaagggcctggcaaagaacaagtgtggcaaatgtgcgaccctccaccttcccccaggaggatcagtgcataccacctgcaaagtgtggcatgcacaaaactgaagactgcttatccttaagggtttactgaagaaaggagaccacaatcttcagctccagggctgaagatctgggcttggccatttttattctcatcctctaaagaggcacagggaaccttcagggaataaaagtcacattaaaaaaaaataaaataaaacaacccagaaacagcttacactgagctcaagcccctgggcaaggggtggtacaactctgcccaaagtcacttgagaatccgtgcagcaggcccctccctcagaaaactagctggaagaaaagggaacaccaagtatagggagcacagggcactgcaaaactccagtgctaggggaaaacagtatatagaattcgagggtttttctcatgagtcatttatatttcaatttaaaattttccttttcttgggacgcctgggtggctcaatggttgagcatctgccttcggttcagggcatgatcccagaatccctggatcgagtcctacacgtcaggctccccacaggaagcttgcctctccctctgcctatgtctctgcctcttctctacatgtctctcatgaatacattttttttattttattttttttccatttcaactagtttattttatcagctctttggttttaagtcttttttaatttattttttttaaagattttatttatttgttcatgagagacacagagagagaagcagagacatagacagagggagaggcaggctctccatggggaacccaatgcaggacttgatcccaagaccccaggatcatgacctgagccaaatgaagacgctcaaccactgatccacccaggcgtctctaagtcttttttttcactttcattttttatatttacatttcatagatatattcttcatttttggcttcctttcaccatattcaattttatttttgtacatataagttttgctttctttatagtttcaggatttattgtcttctaacacacaaacaaaatacacacaggaccaagtgggtcaccctgttttgtccacctggaagattatgctctctcccctccccttctgatttcttttttttttttttcctttttttttttcttttttggtttctgaccttttcagatttatctagtgtgtattttgtgtggaccgtggttgatatttctgatttcatttactcattcagccattcttctctgggcaaatgaatagaaggaagaattcacaacaaaagaaagaaacagaggtaatattctctgccacagatctaatcgatatggatgcaagtaagacgtcagagctggaattcaggataacaattacaaagttactacctgagcttgaaaaaaagcataaaagacactagagaatctcatagtgtagaaatgaaatctaatcaaaccaaaattaaaaatgctatgagatgcaggttatattggatctctaaacagtttgggtaaatgaggcagaaaagaaagcaagtgatacagaaaacaagttaatggaaaggaaggaagctgaagaaaagagagaaaaacaatgaatggactgtgaggggaggctttgagaaatcaatgatgccataaaacaaaacaatattagaattattggagttcctgagggagaagaaagagagagagaatgagatagaaggtgtatttgagcaaatcatagcttagaatctccctaatctgaggaaggaaatgacattcaagtctaagaggtagagaagacccctcccaaaaatcaataaaaatagatcaacaccctgataaataatactgaaacttgcaaatttcagaaataaagagaaaatccagaaagctcaagataagaactccttaacctacaggggcaagaacattagactagcagcagacctatctacagagacatggcaaaccaggaagggctagaatgacatattcaaatattaaatgagaaaagcatgcagccaagaatacttcatccagcaaggctgtcattcagaatggaagaaaagataaagagcttccaggacagaccaaaactgaaagaatatgtgactactaaaccagccctgaaagaaatattaaaggggaatcctgtaactgaagagggagtccaacagtaacacagaccagaaagaaacaggaattttataggcaatacaatggcactaaatgcatatctcttaatagttattctgaatgtaaataggttaaatgctccaatcaaaagatatagggcatcagattggataaaaaagtaacccacccatatgctgtctaccaaagactcattttagacctaaagacacctccagattgaaagtgaaggggtagagagccatttatcatgctaatggacctcaaaagaaagctggagtggcaatccttctatcagacaaattagattttaaaccaaagactgtagtaagggatgaaaagggacaatacatcatacttaaagggtctatccaacaaaaatatctgacaatcataaatatttatgcttctatcttgtgagcagccaattacatcaaccaataacgaccaaagtaaaaaaacacatttataataatataataatagcagggtatttcaacacccacacaccacaatggatagatcatctaagcagaagatcaacaggaaacaagggctttgaatgacacactggaccagatggatttcacagatatagagaaagggagcattccgccttaaagcacaatatacattcttttcaagtgcacataaaatattctccagaatagatcacattctgggtcacaaatcaggtttcgactgataccaaaagactgggattcttccctgcatattttcagaccataatgttttaaaactggaactcaatcacaagaggaaatctgaaaggaactcaaacacttggaggtaaagagtatcctactaaagaacaaatgggtcaaccaggaaattaaagaagaatttaaaaaattcatagaaacaaaggaaaatgaaaacacaactactcaaaactgttgggatgcagcaaaggtgatcctaagagggaaataagtagatagcaacacaagtctctcaaaaaaacagaaaagtctcaaatgcacaaagtaaccaaccttacctaaagaagccagagaaagaacaacaaataaagcctaaacccagcaggagaaaagaaaaaataaagattagagcagaactcaatgaaatagggcagcccaggtggctcagcggtttagcactgcctttagcccagggcgtgatcctggagacccagcatcaagtcccatgtcgggctccctacatggagcctgcttctccttctgcctgtgtctctgcgcctctctctctctctctctctgtgtgactatcataaataaataaaaattaaaaaaaaaaaaaactcaatgaaatagaaaccaaaagaacagcaaaacagatcaatgaagctagaagctggttctttgcaaaaattagtaagattgataaacccctagccagactcatcaaaaagaaaaagaaaggacccaaattaataaaatcatgaatgaaagaggagagatcatgatcaacaccacggaaatacaattttaagaatatattatgagcaactatatgccaacaaattaggcaacctggaagaaatgaatacattcctagaaacttataaactaccaaaactggaacaggaagaaatagaaaacctgaacagacccatagccagcaaggaaattgaaacagtaatcaaaaatttctcaagaaacaagagtctagagccaaatagcttcccagaggaattctaccaaatatttaaagaagaactaacacctattcctccgaagctgtttcaaaaaacagaaatggaaagaaaatttccaaactcattctatgaggccagcattaccttaatcctaacaccagacaaagacctcattaaaaagtagaattacatgggcagcccaggtggctcagcagtttagtgccaccttcagcccagggtgtgatcctggagatccgggatcgagtcccacatcaggctccctgcatggaggctgcttctccctctgcctatgtctctgcctctctctctttctctctctttctgtgtctctcatgaataaataaaatctttttaaaaaaatatgcttataaaaaaatagaattacagaccaatatccctgatgaacatagatgccaaaattctcaccaagatactagccaataggatccaacagtacattaaaaggattatttaccactaccaagcaggatttaatcctgatctggaagatggttcagcattagcaaatcaatcaaaatgatacatcacattaataaaagaaaggacaaggaatatatgatcctcccaactgatgcagaaaaagcctttgacaaaatacagcatcctttcttgattaaaactcttctaaatgtagggatagagaatagaagaaacatacctcaatacaataaaagccatctacaaagagcccacagagaatatcatgctcaatagggaaaaactgagagggtagccctggtggcccagcggtttagcgctgcctttggcccggggtgtgatcctggagacctgtgatcaagtcccacatcaggctccctgtgtctctgcccccacctctctctctctctctctctctctctctctctctgtgtgtgtgtgtgtgtgtgtctgtctgtcatgagtaaataaataaaatcttaaaaacaaaaaaactgagagcttttcccctaaggtcaggaacacaacagagatgtccactctcactactgtcgttcaacacagtactagaactcctatctcagcaatcagacaacaaaaggaaataaaaggcattcaaattggcaaagaagaagtcaacctctccctttgcagatgacatgatactgtatatgaagaacccaaaagaatccaacccccaaattgctagaagtcatacagccattcaacaatatggcaagatacaaaatcaatgcacagaattcagttgcatttctacacactaacaatgagactgaagaaagagaaatttaaggaaccgatcccatttacaactgcatcaaaaaccataagatacctaggaataaaactgaccatagaagtaaagaatctacaaaatacttatgaaagaaattgagaaagacacaaagaaatggaaaaacattccatgctaataggttggaagaataaatattgtgaaaatgtctatgctaccaagagcaatctgctcattcaatgtctccatcaaaataacattgacattttttacagagctggaacaaataatcctaaaatttgtatggaaccaaaaaagaccccaaatagccaagaaatgttgaaaaagaaaaccaaagctggaggcatcacaaagcctgacttcaaactgtatttaaaatctgtaatcatcaagacagtatggtactggcacaaaaacagatacatcaatcaatagaacagaatagagaacccagaaatggaccctaatctctatggtcaaataatctttgacaaagcaggaaacaacattcaatggaaaaaggacagcctcttcaataaatggtactaggaaaattggacagccacacacagaagaatgaaactggaccattctcttacaccatacacagagataaactcaaaatgatgaaagatgtaaatgtgagatagaaaaccatcaaaatcctagaggagaacagaggcagaaacttcttgcaagacatgtatataaaggcaagggaaacaaaaacaaaaatgcactattgagacttcatcaagataaaaagctcctggcacagcaaaggaaacagtcaacaaaacagcagccttaggataaagaagatatttgcaaatgacatatcaaataaagagctattatccaagatatatgaagaacttatcaaactcaacacccaaaaacaaataatctggtcaagaaatgagcggaagacatgaacagacatttctccaaagaagataaacaaatggtcaagagatacatgaaaaaatgcttcacatcactcggcatcagggagatacaaatcaaaaccataatgagataccaccttacaccagtcagaatggctaaaattaataggaaacaacaaatgtcggtgaggctgtggagaaaggggaatcctcttacactgttggtaggaatccaagctggaaatgcaagtcactctggaaaacagaaggtcctcaagaagttaaatatagagctatcctacagctagcaattgcactactaggtatttatcctaaagataaaaatgtagtgatatgaaggtgcacctgtaccccaatgttcatagctgcaaggtccacaatagccaaactatggaagaagccaaaatgtccatcaacagatgaatagataaagatgtagtattactcagccatcagaaatgattgatacttatcatttacattgatgtggatagaactggagggtattatgctgagtgaaataagtcaatcatagaaagaccatatggtttcactcatatgtggaatctaagaaacagcactaaggatcataggggaagggagggaaaatggaatgggaaatttcagagaggaagacaaaccatgagagactcttaactctagtaaacaaattaaaggttgttagaggggagaagggagttggggtaattgggtgatggggattaaggaagacacacagtatgatgagcactgaaggttatatacaactgattaattattgaacactatatccgaaactaatgatgtactatatgttggtgaattgaatttaaattttttttaaaaaggtataaaccctcagttataaaataaagtcgaagaaaaatccattggtttgatgagaatctacaaaatcatgagtttcttgatctgtccctggtatcataatgtgtaagaactgcctattccaggatttctctagaggctggcaagagtcctgaacccgctgtcatttctatcttgctggcctgacagggttgagaagatactagccttggacccactttcctttcttacctaatgttttcctaccagaatgctctgggttgtaattgccatgagttggaaacagtttgcatctacaagtataaatttattcatccttttaacttatgtaaggcttttgtacccaattatcaattctttaaaatatgacactaaattttggttttctactgtcatgtgagaacattaggacccagaaaaacatcattgtgtgaggaaaataaagtgctgcagcaaagaaaataaaaaataaaatcatggagatacaacgtccaagatggtgacagtagtcaacagtatcataataactttacatggtgacaaatggcaattgggacttatcgttggaataattttgcaatgtataaaaatataaaatcactaccatatacaccagaaatgaataggatattatgtcaattatacttcagtaaaaaataaaattaaaaattaagaaataaagagtcttggttgtcaaaaacaagacttccaacaataagaaaacaaccccattaaaatatgggcaaaagatggggtgcctaggtggctcagtcagtttaagcatccaactcttgattttggctcaggtcatgatcttagagttgtgagatcaagctccatgtagggctccatgctcagcagggagtctgcttaagattctgtctctccctctccctctgccccaccatccctctaaaataaagaaataaatctttaaaaataaaataaaataaatatgggcaaaagatctagatactctaccagcgaaaatacacagatggaaaataaggatattaaaagatgccaaacatcatatgtaattaaggaaattacaaattaatacaatgagataccacaacaactggaatggctaaaatctgtttttaaaatggacaatagtaaatgctgacaaggatgtggagcaatgagaactcattcgttgtaggtatgcgtgcaaaaatggtaaagccacactggaagacagtttggcagcatcttataaagttgaacataattcccccatatgatcacacccctaagtatttacccaaattagttgaaaactacatccatacaaaaaaagctacacacaaacatttatagaagctttattcataattaccaaaacttagaatcaaccaagacgtcttcaataggtgaatgtgtaaacatacactggtataactatataatgggatactattcagtgataaaaagaaatgagccatccagaagaaatgaacagatatttccctgaagaacacatccagatggtcaacagacatgtgaaaagatgctcaacatcactcatcatcagggaaatacaaattaaaactacagtgagatatcacttcacacctgtcagaatggctaaaatcaaaaacacaagaaacaagggtgccttgcgatcaagccctatgtagagctccatgctgggcatggagcctgcttaagattctctcttcctctctctctgctcttcccctcaacactctcccaaaataaataaataaacacaagaaacaagtgttggcaagtatgtgagaaaaaggaaccatcatttactgttggtaggaatgcaaactcatacagccactctggaaaacagtacggaggttcctcaaaaagttaaaaatagaactaccctacgttttagtaactacactactaggcatttacctaagagatacaactacaaacactcattcaaaaggatacatgcccccctgatatttattgcagcattatttacatgagccaaattatggaaacagtctgtgtccatccatagatgaatagataaagattggtatatatatacaatggaatgttattttatccataaaaaagtatgaaatcttgccatttgcaacaacatagagctagagaatataatgctaaatgaaataagtcagagaaagacaaataccatatgatttcagtcatacgtagaatttaagaaacaaaccaaaaaaatgagcaaaggtaaaaaagagaaacaaaccgagaaacagactcttaactatagagaaacaaattgatggttaccggaggtgaggtaggaggaaagacaaataaaataggtaatgaggattaaggagtgcacttgtgatgagcactgggtgatgtacagaatcactgaatcaatatattgtactcctgaaactaatatagcactgtatgttaactatgctggaattaaaatttttttaaaaatgagcgatcaaaccatgaaaagacatagaagaaccttaaatacatgttgctaagtaagagaagtcaatctgaaaatctacatctgtattattccaactatatgacactctggaaaaggcaaaactacagagactgtaaaaagatgagtgggagggataaatagatgaagtatgagatttttttaggctaatgaaactattctgtttgataccataatggtggatatgtgtcattacacatttgtcaaaactcacagaactgtacaacagaaagcctgaatcctactgtaaactaggtgcttttattaataaggtactgatactggttcattgattataacaaatgtaccatactaatgcaaagtgttaacaataagggaaactgagtaaagaggagaagagagtcataccagaattctctgcactatgtgctcaattttctctgaatctaaaattactcaaaaaaaaaaaaaaaagaaaattaaggggcacctggatggcacagttggttgggcatccacttcttggttttggctcaggttatgatctcagagtcatgaggtcaagacccacatcaggctctgcacttaacacaaagtctaattgtccttctcccatcctctctgcccctccccactgatcatactcatgcatgctctctctctaaaataaatacaatcttttaaaaaatagtccagtctcctctaaattggaagagtaagagactagtagtagtgtgtgtacactcatcactatatctcaaatagagttcattccagcaccatggggagaaatttacaaattgcagaacctaggtatgactaactaattcttctctttagtcaagttgttaaggacaaaaactctaaaactggaaaaaatggaggaaaagctaagagcagagtagtaggaggaccctaggcttgcctcatctctcaaacacagctaatgaaactattatataaagatcaaatcattctaaatacccaagaaatctgaggactgacagaacaaactgtacaaatagagggagagaagaggacatatcatagaaggtaggagatgcagagatgtggtttggggagagaaacagatcgtgggtgctgcagaggggacagagccctgctcacagataggagggagagggagagacagacagaaaggagtgcacaggagattgcattaggaaaacacttccccagagccactgattgggaaaactgatttttgtgaatttttacaaccagtgggactcaaaagactggagctttagctatccacagcaaagcaggtatggagcctggcaagcactgcagttctcctgtagagaaggagatcagatagcctgtgatctgaggattgcctgggatgcactgggagagacagttctccttcttggagcacatctgggagagcatcttttcttcctctgtgtctcagcatagctgcaaagacacctgctgagggaagctaatctggaaactggctctttgctatgttttacaccaaactccaaacccctgcactttggcgtatctaccctttgggacaaacctgcatcacccccagcacagtgagaccctcccctggagaaccaacacaggtccctgctgcaccaggtctctaaagtttggagttttaaaattcatcccatctgcctaggatagaccccaaggtgcactatatgatcaggttgacagacagggttaaggtagggatttgagggatgcctgggacacactaaggggagattctctgctcttctgggaggggttcctggacagtgacaggcttgaactcccatctctagagataagggagggggctggccccatttccctcccctacgcctcagcataaactaatttcagtaagcagcaaagtgccaaaagtggtagcctaaacagtttatgccaaacccattccctctgctctgctggtgctgctttcttgggcaagtgtgcctaagaaccagtatggcagcccctccccaagaagaccagcacaaaccccccaccccctacgtaccacatctaccaaccataaagttccacaaagtttccactctagtggaaatagcatcaggtctcttttaacaagcagatcagaatacaactagttaaaactcaccacactctggccaaggccaaacactccccaatgcaggcaagatgtaactgtgcagaaaactgacctgaggaaaagaggtgccaaaacacacagtagcccagtgcacactctgaaacacttactaaagcaccaggccctggacagtataggacttcttcttcataaaaccattactctcaggaacagtaaatataacaggctttcctaacacaaagaagacagaaacctggacaaaatgccaagacagaggacctaaaaggaagaacaaaaaatggtcatggccagggatctaatcaaaacagatataagtaatatgcctgatccagaatgtaaagcaacaatcataaagatactacctgggcttgacaaaagtatagaagataccagggatacccttaccgaagagacaaaagacctaaaacctagtcaggccaaaatgaaaactgtaataactgagatgcaaaactgactggatggaaggaccacaggatggaagaagcagaggaacaagaaagtgatacagaagataaaattatggaaaataatgaagctgaaaataaaaatattggatcacaaatgtagacttagggaattcagagactccataaaacataataatatttgtatcatagaagtcacagaagaagaagagagagaaaggaggcagaaagttatttgacaaaattacagctgaaaacttcccctatctggtaaaagaaacagatatctaaatccagaaggcacagagaactcccatcaaactcttggccaacaccaagacatatatcatagtaaaatttgcaaaatacagagataaagaaaaaaaactcttggcaaacatcaagacatatagtaaaatttgcaaaatacagagataaagaaaaaaatcctaaatgaaggaagacaaaagaagtccctaactaacaagggaagaagaataaggttagcaacagttctatccacagaaattcagcaggcaaaaagagagtggcaggatatattcaatgtgctgaatgggaaaaatatatagccaagaatactctatcctgcaaggctgtcattcagaacagaaggggagataaagagtttcccaaacaaaagaagttcatgaccactaaaccagccctgcaagaaatattataagggactctgggtggaaaagaaagaccaaaagtcacaaagactacaaaggaacaaagaaaatcgccaaaaaaaaaaaaacaaaaaaaaaaaacaaaaacaagtaatacaatggcactaaatttgtatctatcaataatcactctgaacgtaaatggactaaatgctccaatcaaaagacatagggtgtcaggatggattaaaaaacaacaacagggacgcctgggtggctcagcggttaaacatctgccttcagcccggggcgtgattctggagtcctgggattgagtcccacatcaggttccttgcatggggcctgtttctctctctgcctgtgtctctgcctctctctctgtgtctctcatgaataaatagatagaatcttttaacaacaacacaaggcccatctatatgctgcttacttcattttagacgtaaagacacctgtagattgaaaatgaggggatagagaaatatttaccatataaatggatgtccactgaaagggagagtagtcatacttatgtcagacaaactagattttaaactaaagactataacaagagatgaagaaaagacactacatcataataaaggggcctatccaacaaaaagatctaacaattgtaaatatttatgcccccagcttgggagccccaattatataaaatagtaacaaacatgaaagaatttgggacacctgggtggctcagcagtttagtgcctgccttcagcccagggtgtgatcttggggtcccaggattgagtcccacattgggctccctgcatggagcctgcttctcctctgcctgtgtctctgcctctctctctctctctctctctctctgtctctcatgaataaataaataaaaaataaaataaaatcgtaaaagaattcattaataatataattctaggggactttaaccctccacttacatcaatgcacagatgatccaagcagaaaatcaacaatgaaacaatgggtttgaatgacacactggaccagatggacttaacagatacattcagaacatttaggcccagagcagcagaatacacattcttttcaagtgcacatgggcccttctccagaatcgatcacatactagttcacaaatcaggcttaatgagtacaaaagactgagatcacattttctgatcacaatgctataaaacctgaagtcaaccacaagaaaaaacttggaaagaccacaagtacatggaggctaaagaacatcctactaaagaatgaatgagtaagggcgcctgggtggctcaataggttaagcatctgactcctgatctcagctcaggtctttgttttgtttgtttttttaaaaaaagattttatttattcattcatgagagacccagaagagagataggcagagggagaaacaggcttcctgtggggagcctgatgcaggactcaatcccaggaccctgggaccacaacgtgagctgaaggcagatgttcaaccaccaagccaggcaggcatcctgatctcagctcaggtcctgatctcagaattatgagttcaagccccacattgggctctacttaaaaaagaagaataaaaaaatgaatgggtcaatcaggaaattaaagaataaaaaaaatacatagaaataatgaaaatgaaagacgatggcccaaaacctttgggatacatcaaaagggtcctaagaggaaagtatatagcaatacagacctacctcaagaagcaaaatctcaaatatgcaacctacacttacatctaaaggagctagaaaaagaacaacaaatgaagcctaaagccagaaggagggacataataaagatgagagcagaaataaatgatatagaaacaaaaagaaacagaccaatgaaaaccaggagctgaatctttgaaaaaattaaaatcataaaattaagaaaatttatcaatataaacccctagccaagaaaaaagacccaaatgaataaaatcatgaatgaaagaggagagatcacaatcaacacaacagaaatataaacaattataagagattatgaagttgcaaaggtggttcaatatttgtgaatcaatcgtgatataccacattaataaaagaaaggataagaaccatatgatcctctcgatatagaaaaatcatctgacaaagtacagcattccttcttgataaaaaccttcaacaaaatagggataaatggaatatacctcaacatcataaaggctatatataaatgatccacagttaatatcattctcaatggggaaaattgagagctatggtcaggaacaagacagaggtgtctactctcaccactgttatttaacatactggaaattctagcccctgagcaaacagacaacaacaacaaaaggcatccaaattggtaaggaagaagtcaaattcactatctgcagatgacatgacactctatgtagaaaacccataagactccaccaaaaaaactgcaaggactaatatacaaattcagtaaagtcacaatatacaaagtcaatgtacagaattctgttgcatttctatatgccaataatgaagccatagaaaaagaaatcatggaatcaatcccatttacaattacaccaaaataataagatacttaggaataaacctaaccaaaaaggtaaaagatctgtactctgaaaactatagaacactgataaaagaaattagagagggcataaagaaatggaaaaaacattccatgctcagagattggaagaacaaatattgttaaaatgtctacactacccaaagcaatctatacatttaatacaatctctatcaaaatactcaccagtatttttcacagaattcgaacaatcctaaaatgtgtatgggaccacaaaagacctcgaatacccaaagcatcataattctgaacctcaagttatattacaaagctgcagtcatcacgacagtatggtacagacacagaaacagatacacagatcaaaggaacagaatagaaaacccagaaatggacttacaactatatggtcaactaatcttcaacaaagcaggaaagaatatccaatggaaaaaatacagtttcttcaacaaatgctgttgggaaaactggacagcaatatgcagaagaatgaaactgatcacttacaccatacccaaataaaattcaaaatggacaaaagacctaaatttgagataggaaaccatcaaactcctagaggagaacataggcacaaacctctttgacatcagccatagcaacttcctactagatacatttctggaggcaagggaaagaaaagcaaaaattaactattgggacttcatcaagataaaaaatttctgcacagcaatggaaaccatcaacaaaactaaaaggcagcctacacaatgggagaaggtatttgcaaattgcatgtctgataaaagattaatatccaaaatctaaaaagaacttaacaaattcaacatctaaaaaacaatccagttaagaaatgggcagaaggcatgaatagacattttcccaaagaagacatccagatggctaacagacatgaaaagatgttcaacatcactcatcatcagggaaatacaagccgaaactgcaatatctcatacctatcagaatggctaaaattaacaacacaggaaacaacagtgttggcaaggatgcagagaaaggggaaccctcttacactgttgatgagaatgcaaactaatacagccagtctggtaaatggtatggaggttcctcataaagttaaaaatagaactaccctaagattcagcaatttcactactaaggatttacccaaaggatacaaaaatactgatttgaagggttacaggtgccccagtatttatggcagcattaacaacaggtaaattataaaaagaacccaaatatccatcaactgatgaatgaataaagaagatatggtagatatgtacaatggaatattactcagccatcaaaaagaaggacatcttgccatttgcaacaatatgaatggacccagagtgtattattacactaagaaaaaaagtcagttagaaaaagacaaatgctatatgatctcactcatctgtgtaatttaagaaacaaaacaaatgaacacaggggcaaaaaaggagaggcaaaccataagacagacctctaactatagagaacaaaactaagggttgatagaggaaggtgggtggaggatgggctagacaggggatgggtattaaggagggcacttgttatgatgagcactgggtgttatatgtaagttatgaatcactaaattacatatttaatgaaactaatataagactgaaactaatattacactgtatgttaactggaatttaaataaaaatttgaaaataaataaaaaataaacctggaaaaatgtataaacaaaatctataattttttaaatgaataaattccttcaaaactacggtataagacaaaccacagtaaaactcaaattctacaattctgaagagaaaagataaatttgaccagataattctttaaggaatagggaaatttcaggggtgctttggtagttcaactggtaaaacatccaactcttgatttcagctcaggtcatggtctcagggttgtgagatcaagccctgcttggggctctgcactcagggcagagtctccttgaaattctctctctctctctctctctctctctctctctctgccttcctcttcctcttgtgagctttctctctcaaataagtaaaatcttaaaaaaaaaaaaaagaatagagaaatttagatgataaatgacaacttggggggaaatgtagtttgtttctctttcatataaagaaagtatctaagacacctggatgactcaatgtgtgaagcctctgactcttcgttttggctcagattgtgatctcatgggatagactgcctactcagcagggagtctgcttgaagattctctccctcaggccctcccctcactcacttgcatgtgtgctctctaaaataaatctttaaaaaaaaaaagtatcagaagctaatacagttcaaatatgacagaaaaatgggcaaaagattccaaatcaaattccaaatgttcaggtccatttcaatgaatagtatacaactacaaaagagtacaggagagggaaactgcttgctaggcactagatatttcaaattgatggttttagcacataaaagtaggatgacaaattgaaaggtatcgtttttcctcatggttatttggaaggtgtagctaggatatggcacactattaagcacagttcttcaacattctgaatatcactacagagaatttttgtaatatattccaaagtcatttttcttacattgcctttttgcaattttatttccttgacatttattccccccccaactcagtttctttttcccataagtgctggtgttgtgtaaggtgctacctggataacctgtatcttgactatacctacatctgtactcctcagttcaaaatcccacagctgcctactggagactcacatccgatgggcattccccttgttaaagtcaactcctcttcccctgtaaatctgttcttcttccttgcctacttcagatgttgatcagagaggattcagggttgagtaggattggaaagacagaaaagaagagattagggattaatttcaagtttgtagttttgctgactgttaccaaattagctcttaccaaatccagttaatttcaccttctaagcattaaaaagaaaatctcctccttgctatctatattttacctccctaaatcatataatagacacacaatgatttctatgtgtgcttggacttcacaaatctattcatgtccaccagaaagagctttcgagtactaatctgattatatcacttttctacctataatcctctgtggagcaatcacttgttgaggtggtcaggacagtgagccgaatttaacaatcaagcctttattcactcactgtggtagtacaagccagaggccaaaagtgaggcaacagttctacaatattctattccttgccccacccaccattggccagcattaggcaaaagtcaaaggggtgcagtgcaggtgcaggggagcatctcatttcaagaagccccaaacaaaggctcttgactctttatgaactcatgggctgaggagaaagaaagggagaagagccaaaagaggaaatatactaagtggagaaaagtgcctcaatcaaagacccctgataaagaggtcttagcagaagcacctgggaggtgcctctgtcaaggtcttttcttataatgaggcctctgaatggagacacttgagctaaaaatacaggttacataggagcatgtctggcctatgtccctaagtcttggacctcaattttctctataaaactgcaatgcactggatatgcaccgagtctggtgtgggtagggcacctttaccctatgagtcctgccagacaaagcctgtaattgcctgtgggcaggactcataggccacataagtattctggcctggagctaacctcctcacccttcagggcctatcccaaagccttaacttcttctcatggtaaacaaagatcccttccatctgacccccatacctacttttctgctgtcatctcctgtttcccatttcatactccagtaaaaactgccccccctctccaggggtgcctggatggctcagtcagttaaatgtctgcttttggctcaggtcatgatcctggggtcctaggatcgagtcccaagtcaggctccctcttcagcaggaagtctgcttccccctctgcatcttcccctgctcattctctctctctttctctctctttctcaaataaatcaataaaatcactaaaaaaaaaaaaaagtattaaaaaaaaactactcccccaaactattctaacctccatgcctttggtcacagtttcccctgctttccccaccttctgtttcttcaccaagcaaactgccacttatcctttaagactcatcccaagtgccacctccaccaggaagcattcttaacaaatacccaccctcattctagacacaggtaactcttccctgtgctgggaatacaagcgctcaggcatacaaacttctaccaatttacttactacacagtattttctgtttatgtatctgtctatgtaacaaaacactaaattcctagagaacagaagccatatccttttctattctgtatccccagtgcctaacaagtatctggcacatagcaggaacacgaggaatcatctatttgtggaattagtgttctatgaatcagcattaacacagcaacaggacactacagcaggattgaataacacaagccccacaagctaaccagttcccagcacgggcagcctctccacactaaggcccaactgtttcaaaaccaccttgttgtcaggttatccaacatggacctgctggtccaggatctgccatcaaacttctcaaagacaatcttagtacctaaggataacatccttatccttcaacgaatcttctttctctatctcttcaaccctcatatctggctctaagactatcgtcagatacctgctgtaaaaacagcagaaaccagtaagcttcccgagaacaagtatcaaatctactactggggctttttgctaagcctttttatgaccccaatcctcaagccagccagccatccttctttaagagaaaagcctctatgcagcctaacagttctttggaattcctctcgaaaagaccaccattcacttcttacaattggcttcgtagtctacaggcctcagattccatggttgtcaggaatttctaaaaacttttcatttatatatgatgtgtactggaacatttaaaagtgtccactagcgaagtgataactacaacttttcacctgtaagttctgagtttcctatcatttaactttcacccaatttttatgggaatccagtcagagagtagaaggaagaggagagccaagcagaaaacaaagatactcaatgtcagcaaaggtcttagtggccagcagccctaacacaacattaaactggaaaggttcatgtaaacttgtgtccctaatgaagtcatggcttcaaactttgtcactgaagaggtaatcagacttcatccaggaggagactgcacaaatggactccacataggcctaaatcctagacttccaaattccatgttaggaaagttaaatttagatattctctctgtttctctctctgtctcgctctctgtaaacactaagacgtgttccgggactactggcgctgtttctgcatctactgagtagacacagaactacagaccccagaaaaatcaagctgggatgagaagcatgccagatattttaaaaatcccagtgagaatagcaaagattagcttcttacctagtaaaatccttactccacaggtatattcaaaagcaaaagcaatactatgaccatgtgattgtgttctctcctactttttaaacaaagatgtttttgtatcctttgccattcaagacattttagatcctctacatagggaaaagacagatcagtaattttgtgtgaaattaatgcctacaaatataatgttaaaaccctaaaatattttaatggattatgattgcctaaaatgaaatcgagataaataacaataaatcaatgagtaccccctgtacttacaagagaacatgggcaacgatggcattcacatcaaacaagacatcagtagggaattctctaagtaagatgttgcccctattaaaaaaatttaaaaagcattacagaaatatttccttggaattcacttttcttgtctctccaatacggtaggttataagtcctttgacgttacagccttggtatttatccattatctcatgcacctaccagcatgctgactgtaaaaaacacacaaatatttattgaatatacactcactacgtatgttgactttgaagagcttaggctctgggctaggcaaaaagattgggaaaacacatgagtctcaacaaggcgtcctaccatactcccagtcacatacacatacattccctaaatgagctggggaggagacaagtaggagagagaaagaagtgtcctcagcagttgatctctgaggagagagactctgcccccacttctcaggccaaatcccaacagtttgagaaaaagactttgagaaacctcagagactagcagatcaaaatgcaggggaatctgtaactgggacattggcagatctctcaaaaatacatttccttcacacccaaatatggacatgacagatccactcaaaacactaaatttgttaagtgcttactttcccggcacttatagtaggagtttacataagaattctcacgtaggggcagccctagtggcacagcggtttagcgccgcctgcagctcagggcctgatcctgcagaccctggatcgagttacacatcgggctccctgcatggtgcctgcttctccctctgcctgtgtctctgcctctctctctgtgtgtgtgtgtgtctctatgaataaataaattaaaaatctttaaaaaaaaaaaaaagaattctcacgtaatattcaaaacaagcctgtaaggtaggttttatagctattttatctcatttcatagataaggaaggtaaagtgcaggtaacaaatctatgacttagactgtttgctaaacttcatatggccttcattgcataaagctttattctggcttagtgacattttatacattttaatattctagaagtaaagctttgtatctatcacactcaaaaaaatactttacctgaataaatatgctttcatcaaatccttttcttttccacagtatcttgatgtttcttctttgacacaattaacctttaaaagattatatttaaggtttagagtatatatcaaaaggtcaagtttcttggttagagaaacaagaaggaaaattaaacagtagtttgtctccaggtcaaattttttattttacttttctttctgatttatatcctataattgctcatttattcaagtgctcaaggtaacccagagaaagaaattgtttccacatctaagagttatatttaattatacttaagagtttacatttaattcaaacttatagaacaagtaggaggtaaccaggtagaaaaggaaagaaacaataaggcaggacaaaaaaatcatgagcaaaagccaagaagcagaagtaagctgggagcatgaaagcatctcagcatctggaatacagatactgctggtttcttatccaaaatccatccttcatttttgttttactaacagaacttccctaaacacaagtgcctcaatgaaagaattttccagacgctccaacagctacagatggcccaatagtgttagaagtcactggggttggattccagacggttcttaaaagggagctgacttatactcttttcccacttcttcctgacaaaaaacagacaaggcagctggggaccaacagtaatcatggaccataaagcatctttaaaggagaaacccttgctgaggatggtaaaacaaagaatgaacctgagtcattgatgatgttagggtagccatgacagtccctgatagtttataatctagactctgtgtgaaaaatataaggataatcctggcagcaacatgaaggtacaatggaaggcaagagagcacaaagataaggaagcaggttaaatgaatatgatatcataaagggcaaggatgactggcatctgaagtaaagcagaagaggacaaaagaattcaagagacttttcaccaatcgagcaagtagaactagggaggagactgagcatatgtatagagtatgggatagagggggaaggaaagagatgaagagaacgaagaggttttaagatggggcaatgggtagccaccaacaaaacgtaaactaaggctggcagaaaaagagttatttcattttgtaagtttttggtctttttaatgggttgaagattttgtgtgtgttcaatttaattttaatagagtttgagggagcagaatgacaactggcgaagctacatttattttcaaaagctacaagagaatggacagtcaaaaaatattgagaatagagaattagaattaaaagtcagaatacaggaaaaaaaagtcagaatacagctacaaccaaaaaagatggaatgttagaaagaatttttaaaagtcagagcataggggatggctgacatcacgacaatagatatttttccattcatcccgtgcaacatatatatgaacacctaccatatgttagtcactcttctagtcactgggggtacagttaagttccaaataaagatctttatctttagaacttacattctaaaagtagagacagacaattttaaaaactaattaatatgtagtgttaagtcccataaagaaaaaatagtaaggggatactgtgtgacaagacattttagataggtaatcaaggaaggcttgggggagagggtgggccttgcacaaagaacagaaggaatagaatgatgcatctgattatataaatgtgtggaagagaggaattctaagcagaaagggaaatatttgaaaaggccttttggaaataacacttctagcaggttcaggtaacaaaatgatgacttgtaggtgccagaaaaaactgagaaaggtaaagggatgaaaaatgcaattagagaggaagccagtgtccaaaagagtgaagagtttctattttatcctgaatctcacgggaaatctttctgaaggggtagcaaagtgacctgacacatctgactcatgtgtggagaaaagtttagtgggacaaaagtaaaaggagaaagaaaggccaattattagaagactactgtagtggggcagcctgagtggctcagtgctttagtgctgccatcagcccagggcatgatcctggggatctggaatcgaatcccatgtcaggttccctgcatggagcctgcttctccctctgcctgtgtctctgcctctctctcgcgcgcgctctctctctgtgtgtgtgtgtgtgtatgtgtgtgtgtgtgtgtctcatgaataaataaaatcttaaaaagaagaagaagaagacgacaacgacgacgacgacgactaccgtagcttaccagatgagaaatgatgaaggtttggataagggggggaaggtcacagtggaggtgaaagaagtggtcagatttgggaagttttgataatagaacttaaagatttattgatggattagttatgacaaaaatgaaaaatcaaagatgattcaaagggtttttgttttaaaatctgctttgaggtgcacctggatgagttagtccgtttgttaagcggctacattcagctcagatcatgagcttggggtcctgggatcaagccatcaggctccctgcccagcaggcattctgtttcttcctctccctctgcctctcatcctgcttgtgctttctctctctctctctcaaataaataaaatcttaaaaaaaaaaatctgcttcaatacagtaaaatagctacactagctttcttttggttattaattacatgatacatctttttccttcatttactttaaagatgtctgaactctaagatacatttctaaatagtacagagttgggtttggttattatactcagcatggcgatttctgtcttatcatttagtccaatttagattttagggtttttttcatctatgtctgcctcttgaaatcttaacttttaaagactatctcaaaatgctactgtttgtcaagtctttcccaatgccatacatgaccttctgccctgacaattagatatgagctgcccttcctttaaacttcagtggcattttatttgtatcacaatgatcatgttctgctaattattgaaatgaaatgtgaatgtattttttctcccctatttaggacctaaattcttcaaggaaatagactgagtcttagtcatatacctatctaagagactaaataaagtcagctcatttcaatgtcataaacatttacctagtatctattacagaccaaagagtgagctaagtccttactagaggcctgtcttattcaccagtctcctttccacatagtttagcatcctcaactgtaaaatcaagaccaagttttgtcagttcataaaggcaaaaccctgggcatgaagcttaatattctattgttagttagttagttgatacatggttactagttactagataaacagcaggactaccccttttgaatgtcatatcaacctagtatttcatgtgtaaactgtagaattttattaaaagttcctcaaagatgggcaccattatcattctggagtataatcagttgttcaaagtcaacaaagttacatacggaattgacttaaaagatttccttaaagtattttgcagtgatataataagaagagatcattggttttttccgcctggtttctgatattgttatttcctgagtgatgggagtgcgaggaatatcttttattctagtatttggtctttaaccccagtttcttatataagagcttctaagaccttggaaacctctgcagtgtttaagagtatctttctgcatgctaatgaggtgactgatccctaggggcccccatatagctttgagatgggagactgctcaccaaaaagacaaacgcatgattagaaggttgaactttctatcccacctcctatcctcagagctggaaattgagttaatcaccagtggccaaagatttaatccatcatgcccacataacagacccccataaaaaccctaaacaatagagcctggagagctttcaggatggtgaacacatccatgtatgggagacactccaaactacaagaggatagaagctcctgtactcaagacttccagaccttgcccttccagacatcttgtccatttggctgttccagagttctatcatttataataaaccagtaatagtaaagtgttctcttcatcctgtgaaccattccagcaaattattgaacccaaggagggaattgtgagagcccccaatttgtagctgagtcagacagaagctgtaggtaacctgggaatcactccttgtgactggcatcgaagtggaaggcagtcttataggacttagtcctcaacctgtgagatctgggctaagtgggcagctggtgctagaacttaatggtgaggaaaactcacacctttggtgtcagaagtgttctctgggttgaggaaagagcttccctttaatagtcaaggttagttaaccttcctatgcttcccgccccaggaactctaactgcagggactaagtaggacagtggccatctctcagaggtagaaagctaatgaactaagaaagaataaatgtacacagaaagtcaggtagattctaatctaagataacttaataatcattgggttttaatcattcaactttctgaggtacaaattctaagattaaagttaatgaaaagctcaggtagctaactatgatgcatgtggagattttccgtaatactcaatgacaaatttgaacattttttgagaaaaaaattaaatatgtcatttcaagttaggttgttttgactttgttctaaaaaaaaggaaaaattacaacataagcaattacaaagacttaaaagaacagacaaggaaaaatgcttcaactacctcaattttggtaacttagtttgtgctaatagaaatttagtaaatagttgaatgtggagatctattaaatttgtcaggcaaaacaacacaaaaaagcctaactataggattgaaagctgaaccatagcctcaataaaacagtttacaaaataaaataagttctaagctaaagaattttgacagctttttttccttcatgtaccaatttacccaataatctggaactatctttctgcgcttctgtttttttcatataaaaagggcagaaaaattatttttccagtttggaaaaaggtgtgaaacataagtatatttagatactcagccttcagtcacacaattgtcaaatgtttgtcactaataatttagtaacaaaaatgtctttctacctttgcaactgaaattccatagtcctggagaggtgtaacagcctcattcagttcttcaagaaatatagaggttcttggagaatctaaaataagaaaggttttatgaatgttttatggctcgctccttaggaaagacgaatttttaaaattaaagcccaaagctgcaaaccatagatgaaatagattagttcacctaacaagtatacaaaacaaataatacagtaaacatacctatatatatttatacccttatttcctattgcctcattattcttgacatttaagggctcctaggtggctcagtcattaggtgtctgctttctgctcagctcatgatcccagtgtcctgagatcaagtgccatgttgggctccctgctcaatgcaaagctggcttctccctctcctccctggcttgtactcttgctgtcactacctgtctctctctcaaataaatggataaaatctttaaaaaataaagctaacatttggcattatttttccaagtttaataccatgtacacaacacacatgtacacatgcaaaaaactttcaaaatgagtttaaaactttttttatgagcgaaagagaaaacatacatgcaagtgaggggaggggcaatgggagaggaagagaaactcaagcaggctccacacccagcatggagcccatcttggggattgatctcacaaccctaagatcatgacccgagctgaaatcaagagtcccacacttaactgacttagccactcaggcacccctcaaagtgattttaaaaaactatttttcaaaccagagttataagagagtcaacagaaatgtggatttatttcacttactaattccaagaataatattttttttaagggatacaggtttaatgagaccatcacaatctttagttatgttcaatacttacactggttaatcagtataattaatggtacagctacagtagagtattaaacaaaagccttactaatactacatttaaagttttaaaacactttaaaaatatttgttcaccaaaaataccaaaaagcatactttcagaaatgactagatggaaatcagatgttattctactaatcattcattctcatctagtatttattatggacaagtcacatgagtaaattcatttaatcctcacaacaaatttacaaagcaagtattatttcctcattatagatgataaaaacaaagaggctaagtgacttgatcaaaatcacacagtggcacaatccgcatttaaactcaggcagacatattttagtagcagctttatagcacatattaatcctaacaataaatttccactgagaacactgattaaatagcaatagaaacatcacaaaaatcatgtagaatataaaaagtactcaccagcttgacaaaaataagctaaggaagcttttcctggttgcaatgtactgaaatatttctgaggactcagttctgatagagagtctactgctgacttataaaaaatgcacattatgacaaaagagatgccaactctaaatatattgaaactggaagacatcatcagctgtagttgtacagaggcaggagatttttctctgttttgttcagtgttgtggtcctgttgcctaggataatacctaggaagagtaggtgtttaacaaagttttgctgaataaatttgttaaacaaatgaatgaagtaaaatctgcaaaaaataataatataaggcattacttatatatttgatttttgccagtactttcctatttccttctattaaacaattgagagggatatataagatgacattaatttaataatactattgatttttgatacttccaaaagacatgaaggatatctagaaagtacaatacgaaatacttaagtttaaaagatatttactagagtatgttaattgtcatttttaagggttctaaaattaattctcaaacattattcaattcttgttttaaattgggcattttaactttctctacctagaacagatttacaatcaatactcaagtagttatttaataccattaataggggagtgagacatccaaaatctatgtctaccatgtttacatcctttttactttaaattccctagaagatagctattaaaactacttaagaacattccttctaaatatacttttaatacatgacttagacttatttatgcagcttagaaattcaagtatctttatcaaaccatattttaattcaactctatcttctgaactcggatctgttttagatatcctcctctcatcttctttcatgctgtacttacttccatgctatcctctgcatctgttgtcaattcctcgtcttctgtttttgctactttcaaatttctcttgaacaatttcttctttcaggaagtttttctactgatgatctatactacctaagtttaaaagaagatagttggggaaagttagtataaatatatcataattctagaaggtaaagacatacataccagcataggtaagaatttcaatttttaaaaattttaaatagaacccctatctttcaaacaaaagatcacaatcacaaaacagaaaacaaaaaaaatagctaaaaattactcataaggagagggtagactttctcaaagattaaaatgataaaagaataaaaaattaagggaaaattatactaaattggacatttatttcactcttaatcttatcagtaagcatataacatctctcaagaagcaggtattccttaaaaaggaactacttactcattaattacttcttagcattttttttattagagctattttatatcagtgaacaaatgtgccattgatagttaataatgaaccaagagttcaaaaactcaagtagaatgagtgaggactgtgagtatatataaaaaagtcattttaatgatataattaaggggtatcctcaacattaacactgattacacattatagccattttaaaccagtgtgttttatagccactttatactaatgggaacggtttaaaataggtcattcaatattttctttattagggggtaggatgggaaatgcatgcatcctgaggctaagggaataaccatgtaacatttgttactatataaaatagctaaaatgtaatgaaaagataaactttttaaataaaagtgcatttgaacaattccagtataaatataactttgactgggcttctggttacaattcaattatttaacactgaattggacagtagggttaacatatgattcttttaccatatgatgggttttgtagcagcaaaaagtctaactgcatattcagtgctacaatactttcccacacttatctcattggacaaatgaaattatagatgtgaaagtactatgcatttgatcaattagagatgttaatgattattcttacatacatactttcaggtataggaacttattagtaactataacctttgcagtttgttccatctttgataaatttgattatctaaggaattacataaggtagagaagattgcatgggtcagccagaaatagaatttgcatggttgtaataaaataaacactgaataatgatttaaccaaattcaagacaaccacagttcagaggatggagaggcagaaaataagggaacacacagagtgggaaaagagctaaatcttcactttcacaaaaccaaaagccaagtatattagaaataggaagatcaataccaaaagaaacagggagcaattgaaataactgcctctaaggaataagaaattgcaagaggaggataccaagaggacttctgaaattttatatagaatcatctgactctttaaatagtataccttttcatttttatttaaagttaaagtcattctatttggactacatcaaaataaaaagctctgcacagcagaggaaacaaccaacaaagctaaaagacaaactactaaatggaagaagatatttgcaaatgacgtatctgaagaagtgttagtatccaaagcatataaagaacttaacatcaaaaaagcatgcatccaatttaaaaacaggtagaagacatgaatacacatttctccaaagaggacatacagatggctgacaaacacttcaaaatatgctcaacatcactcatcatcagagaaatgcaaatcaaaaccacaaggagatatcacctcacacctgtcagaatagctaaaatcaaaagcttaagaaacaagttttgacaagaatatggagaaaaaggaaccctcatgcactgttggtggaaatgcaaagtgatacagccaccatggaaaacagtatggaggggatccctgggtggctcagcagtttagcacctgccttcagcccagggtgtgatcctggagtcctgggatcaagtcccacatcgggttccctgcatggagcctgcttctccctctgcctcattatctctctctctctctctctctctctctctcatgaataaataaagtctttaaaaaaaaaaacagtatggaagttcccccaaaaattaaaaatataactatgttgtgatccagtaattacactactatttacccaaagaatacaaaaacactaattcaaaaggatttttatacacacttttgttttttgcagaattatttgcaatagccaaattatggaagcagcctaagtgtccatcgctagatacaaggataaataagacatagtatatatgcaatgaaatattattcagccataaaaggaatgaaatcttgccatttgcaacaacgatagatctagagggtataatgctaagtgaaataagtcagagaaagacaaataccatatgatttcaatcaaatgtggaatttaagaaacaaaaccaatgaacaaaggaaaagagagagaaagcaaaaaacaccctcttaactatagagggttaccaaaggaaaagtgggttgagagggataggtgagacagatgaaagggattaagaattaagagtacacttctcttggggcacctggatggctcactctaacttagttttggctcttgtgatctcaggatcctgggattgagccttgcaatgggctccatgttaagcagggaatctgcttaaggattcttcctctccatctccctctgcccctccccaagcttgagtgtacactctctctttctcgctctctcaaataaataaatcttaaaaataacagggtacatttctcttgatgagcactgagtaatatatggaattgctgaatcattgtatcatacacctgaaactaatacaacattgtatgttaactacactggaattacaaatataaataaaaattaaagttattatttgtatgtaatcaaattttccatagtttctactcatattaacccaacctatccctgtagggccacagaagaatgttcatttcacatgcatgaaaaataaaatgcatttgcctagagacatgttgtccatataaaaatattttcaggggcgtctggatggctcagtcagttaagcatctgccttcggctaaggtcatgatcccaaggtcctgggatcaagccccacatcaggctcccttctcttcagggaacctacttctccctctccctttgctgctccgtctgctaatgcttgcttgcttgcttgcttgctctttctctctctctctctctctctctctccccctctctctctgtcaaataaataaataaaatccctaaaagatatatatttaaagagaagggaagtataagtgggaaagggtggagaatgagaacaccagtcagaacagagtaaaaacaaatatacagaaggtactcggtgatttttttccctttggtaagtagaaaatagaataaaaaacaatacttaatgattcaaaatctaaatctcaacaaagagaggagtaccttgggagaaatgtgacctcggtactttggtatagtagtagttcattggtatggggtatatatagttccagttctgctgtagaaggcaggattacacttaacttcctacctcccacttgtagtaaattaattgtggctgccaggtgacttactctggccaataaaatgttagcaaaagtagcatgtctctttcagacaacagtttatcagctagcatgtggtagggcaggccgtattttcttctcacacaggcattaaaattgctcatctggtggctattcctagaatgagcacaacacagagaatggaagacatacaccagtctgatatgcaaggagcatgtaacatgagaggaaatccatctttctgtcataagccactgagatttgagggcttcttatggcagcataatctagtttaccctcactagtatacaaactagaatgaggtgccaccttaacaagaaccccaaaatactggctcagaagccacggagcaagaacttaatcaggacagactggagtttggcaatccacattaaggagtgacaaaacatttggtaaaactgttaaccacaatcatttgaaggtgacatatacctcatgaatttgtaatgagcagttaccccagtgtggtacggctaatgaacttatttatggccctaatagaagaggcttatagataggaggtgaggcaccgaatgatagttgctgttggttatgtttaataaggagttcaaagaaaggtactcaaaggaccactgccatccaagagactaactgtttaaaacttaaacagtcctttagaccccacccttctatcattaggaagcaagctgacaaaactgctcagccatattctccaaagccaacttcaggtgtggccaaggataataaacatggaaggacgtcttgcagagtaatgccaaggaccatggagaactatgccctagggcatgtgccagaatacgaactgtttgttactggtccaaaataatcagataaacacagaaattgagtgtaaatgtcaaaaatctattatagctcattttacatggtaattttctgtctgttgaatctaaaaattttttaattgggtttatcatttgttatgtgttttcattccatttttattataattcatttttactgtaacaaaattcaaatttagattttgaatcattaaaaaaaaacaatatctggtcattcatgacagtttgagaagcactgacctacagaacacagtgaacagaacaggagccctagcaatacctgcccagtgagatttcaaaactcctacagactagagtctgtgtatagtcttccattcttcccctctccaaatgggtacacttattatagttatttgtccctacactactctatgtattcaactgggggtgggagacagagaacttataatgtccagactgataagagattagcactactggacattaatcagaaatcctggactttgagtctgacacagtgactggatgagatttgggggttatgtctactgggaagggccaacaatgaactatatgcaaggagagtatcggttcacaaaaagggtggactgtttaaatgtttctagttctccacacctgttaaaattgtacttccccacttccttgaatttggtatagccatgacttgactgacttgacatttcatgacaatgaaatgcgtgatgacacatgttacttccaagagttttcaaagtcgacatattttcatgcctcgcaacacacttcctttctgctgtgatgaatgataacactcaaaataaagccttctctgttgaaccaagtctcagaaaaagaacaacatggggaaaaactcccggctaatcaagagtgaacataaattaaacactgttgtgttaaacctcttaaagtttcagggttgttattacagtataacccagcctagccttactggttttaataacagccaagaggagagtgacttgaacataaatacatatactggatttttaaagcactaaatatcaaagaattaacaggaaactgactcaatttcactgtaggacaattctaaaagggaagagaactcttgcaaatgcaactgactataaccacaacaggtgccgacaccaaaatagggaagtcataggcaaatgtcttccaatactacacacatacatcacccaactacatgcagactcatactgagcctggagagggctctcaacttgttggtataatgctccttgtcagcactaatagagttggtatgcaagatgtaacttttgccttatccctaaactctaaacaagaatgcctgcacagttcatttaaaagttgataggggcagggcgcctcggtggcccagtggttgagtatctgcctttggctcaggtagtgatcccaggaaggatccagtcctgcagcaggctccctgtagaggagcctgctctccctgtagagagcttctctctctgcctatgtctctgcctctctcactctgtgtgtttctcatgaataaataaaatcttaaaaaaaaaaatagttggtaggggcaccaactgagggtagctcagtcggttaaatatctgactcttgatcttaggtcttgatctcagggtaatgagtttaagctccacattgggctccatgcttggcgtggagactacttaaaaaaaaaaaaaaaggaaaagatgtgtgacatttaactaagggcaaatacaagagggtgacaaacactgggaattggaacaatgaggctatagtacaaaaagagttaaagcttgcaaattaaagactaaataaaatgcaacaaaattctggagcacctgggtggcttagttggttaagtgtccgactcttgatctcagctcaggtcttgatgtcagggttgtgagtttggccctacattaggctccatgccccgtggggagcctacttaaaaaaataaacaaataactaaataaaggcaacaaaattttgttcagcaccaaaatactgagggtccccagagggcaatgaggagaaagaattttcaacagaaaaacatttatcttccagctagtgaggggagagggaaggatctgccttcatgtgttccacagctggaggagctggtaactctctacagttagaacaatctcatttggggcttgggtcctatttataatatcacttggcaaacagctcttctacttttaaatgtttggaagaccagtgtgctagagtaatgtaccctcctagaacaatattcaaccattgtgcatttggacacatttcaaattttagaataccaagcagcaagcttttctagaagaccttggttagtttcctctttatagacttaaatttcccttacaattaaccacaaaactaaaagttttccctctcaagaaaaaagaggaaatgaacaactgtaaacattaagcaaattatagcaaactctgtgggcatcgttctctgggaaaaggcacatttcatattttgcaacaaatggggcatataatgcttacgaacgtcctgtaagaacattctggcaaaaattagcttacagtttaatgctgctactggagaaaacctgctcactgaaccagtttcaaataaaatgttgattagatatcatcaaagtttatcatttaagtctggatggaggcaataaaaggagtcaacatctctctacttcaaagccccttcaaggcaatggagcaaaatcctctatctgtatccctcatgccccccctcaaaaaaagaaggggaagagcgatagctatctggacttgctctgaaatgaaaaatttcacaagcaaagacctaaaactagtatggatactctccagatgttgtttactatgagtagagaatataggagaaaaagaaaaaccagtttatggtaaaaatctattcgtgaaatgaaacaagtacctcatcattatggaaaatacaaaaataggcatgtcaggaaacaggaggttcccctgattttgatgagtgccaaaaatcacagaactccgagttcatgcttaagcacgtaactgcttaactcactttaactcactgctgccacgagcactcactccatcccttttcaaaaagaaatgtgtactgccctaaccacattctctaaaaaatctatgaggtaaatctcataaatttcaaaaaaaaaaaaaaaagtgattcttctttgttaatgttggatcagagccatgaacttctttcagaaagttgtaccctgctctaggctgcactgtacaacctgctcagctgaatgtttcatctgagagatccacgcaactgtgccaggcctaaacatcacattttgtcactatacctgtaaagaacccaaaacacaccagtatctgacagggggaccactgtcccagaatctggagtacagagtagactttaaagttccctatggatcacttagctaggaaaaaagacagcaaaactcttcctacacaaagcattaggcaaaggatggcaagttagggaaggctgtcttggttgcaccagtaaatgtagcagtatctttcaaaaggatacggactttgtgatgtgccactcattctaagaacacagatggttttctcatcatttttcgttacttcgctcattttattaccaaacacttaaaaaggaaacaaatcagcaaatgtcgtcggtccaatacacgctggaagatctattcctcacttatttacagcaatagcataatatagcatttgttttgtacctctcggagccccaggaagggcgccaccatccaccaatacaggaccaaggcttgaaggaatacatgtggaatttaaggagtacaaactgttctgcttctttctccctagacattcctcaggcttacagttcttttttccctaaacttatgcccagggcatccttccaaattctaagtttcaaagacccacattcctcctctttacatctcatctggacatccatctcatcctaataccgcctcgtcctctaagagagatttccccaaggaagaattttgcttaaggtgtcagttcatccttctctctaagagaggatgctctctccctcacgtttttctcgccctctcaggctgggggggggggggggggggaccctgaagacgaagaagaagaagaaagcctaatgcccctcaaaaaatgcaggtgaggccccttttaacccaaactccaaaattcactggcggggcacagccgccagggtgaatccccatccctgcaggcagaaaccacagcccctcgactgaaggacccgcgcggccacctacctgcccaagacctgcgggcaagatctagtcagaggaagccagaaggttcccgcggccgacggttcccgcctcgcgaaggagaagcagaaggcggggccgagtctcgccggagggtagcggcgagcagccgcgcctacctgctagggcgcagcactcccgccctccgcgcccgcggccaccaccgcacagcggggtcggcctgcgagcgaaaaaacaaccccgaggctccgccttctcctcgtgctccctacgtgcggcctctccagccaatgggaagcgcagggggcggagcgagagccgccccagctgacgggcgaccaccgagtcctcccgccggcgcgagcgggccgtgcagttgctgggccaatcggcagtgtgggtgggaagtgaaggggagggagaaagtgaggcaagcggctgtccaatcagatccggcagccttcgagcgacaggtcccgtggcccgtggccttccgagcgcggcgcgcagggggcgtgcccgcccgggccaatcggcgcgagcccacggtgcggagcgagcgcctcaaatgctcgggtttctcagctgattgtctccagccgagagttgttttttgcagctaccgagccgagccgcagcaggaggagccgagacccccggggggggcggggagaggaggcggggtccggggagccgcggctgctctgcgcggggctccgggtcctgtcacggcgcttcctggggtcggaggttggggtgggtggggggtaagggggaaatctttctccccctcgacggcggctccgagtccggccccttccttcccgcgctctctcgtccggcccccagccccctcatgagggtgtccgtgccgggtccggcggccggccgcgagccctcgacgcccgggggcggaggcggaggcggaggcgccgtcgctgctgcctcaggcgccgcggtgccgggctcggtgcagttggcgctgagcatcctgcacgccctgctctacgccgcgctcttcgcctttgcctacctgcagctgtggcggctgctcctgtaccgggagcggcggctgagttaccagagcctctgcctcttcctctgtctcctgtgggcagcgctcaggaccaccctcttctccgccgccttctcgctcagcggctccctgcccctgctccggccgcccgctcacctgcacttcttcccccactggctgctctactgcttcccctcctgtctccagttctccacgctctgtctcctcaacctctacctggcggaggtaaggcgggaggaccggcaagcggggccgggcgggtgagcggggctgccgcgatcaactcgggctgaggaccgggaagggggcggggggggggggagggggccggctatgaggcggacctgagagcagcttggggaaactgaggcacgcctggagtgtgcgcgcgtatgctcgccctaaacttaagcggtagattgactcggtttttgagaggctggcggggttgggtgagtgagagtgcgggctctgacaacttacgacaggacaaccctttgttcggtgttttggccccccaaggtaaggtgttggtggcagcaacaaagtggcatcgcaagaagtagcagccccggtagctctgctgaagctgaactgtgttgagagaggttggatgctgaggtagcagcagctctgctgaagctggactgctgccagccattacgtcaccaggcagagctgttcctctgctattgttgctgcgtttcttttattagaagcttatattccctcctgcatctcctttcctgtggctcgataagcctcacacagattccgttcgatagttccccagcagggttaatgatcgataaccaaagccgagggtcagtataaagacctccataaagctcttaatgtttgccccacttgctccaagctttagctatttatcctacctcttacagcctagtggtttttttttttttttttttttttttttggagctaattaagatagaaaatactagcttaacctgtgactattgcagaaacaaaccaccaaactgtttttgcaataacttgcttaatagctggaacctaatcacaccccctttctcttttatggggaattgctggctggattgcattgttctgcagcgcttaggtatttgacccatttcaaacaggtttgagagtgtaaggttgtcaatcatgtgtgtcagctagtggtatttaagccacagaattttgagaattgcccaaaactctcccttccccctcccccaccaaaaaaaaaaaaaagctgaggaggggaggaaacaaggtgacatcatatgcttaatactgactaatatagagcaatattggtctatgcagctaatcctctcaaaggcttttggaggtgatgagaattaacatagttctgagcaaaagtaaaaaaacatttgaggcagattgtttatatttcctgtgtaaaccaactcttttctcccataatagatggaaagtaggatgcataattttaaaattacagtcataacttcagctttttaccacattaaaaacaatacttgaaaataagtaacaaaactaatttaacttgaattcttttccttccccatcctttggaagtccaagcaatacaatgacaaaacccagtgaaaagcaaaaataaaaaacacgggtaatcataaatcaaataatcatgccatagtcacgtcacttatttgatgatgctctcatcttctagttgctgtttaagctgttataacatttctgtccttcctagttaaattgatacattgtattcttcctgacaccatttttgatagaataccagtgacctcttattactgaagctgtaactctagcttcagatataatttacctgaaagtgctagcaatccttatgtcataagcatcagataatttgtttttccctatacattttgacttgtaaaatcatattaatgatgtctcgtaaaataccatttcataaagtagctaaacactcttttttactttttttgagaatacaacatatgccatagagagcataaatcttaaggatgcagctatgaaattctacatatacatacactcatgttatcatcccctggattaagataaacataatttctggtgcccttgtgccctctcccagtcatcctctcaccctgaggtaattataaagtggctagaaactatcacaatagaaaaagcatccatagttaagctaaaaattctaaaagtatgcttctacaggataaactacatgatacccagattaggttttcatattttagttgctgatattccaagagaagaacttaaatgtcttaaagtcttcctattaaatgaatcttttgtgtgatgtagtttttcaaaaagcaataaaactcaataaacctagaaaatataatttggaaagacgatagactaaagcattttccttttgcagtgtctcctaaaaagagtgtagattgtctatgctcgtctttttataatcaaattaacaattttaagattcataactgtacttaaaagaacaaaatttcaaatgtttaaagagagatatcttgaccagaaatcatttccctattcattagaaaaaatccagaggaatctgtatttaaaagaatatttgaactcaaatttttatatcaattccaagtaactggaagtatactttctattgatctgatttaatgaagctttttttcagtaagttcttggtattatagaagtatgtagggagaatctggtgagaaataacaaaactgacacttgattttttttgttttttggtttttggtttttttgtttggtttttttactaaaaggccctatatctgttttgaatagttgtgcttcttgattgctaaatcactctgtatttactatctatcattaaataccaatttcaatttgcttttggcctcttttaagcgttgcttgcatgcatttctcaagattagaaacattctaactttaaggacttagttacaaagaactatggagcagaataaaaataaagttagaaaaacaaccattacactttgaatgcattttggtggttcttctaaaactccttaagttttcaaagagttaagactgcctaaatcacttacttttgttgactacacttgagtggaattgagataaggagaagtagcccttctaaagtaattagacttctcaatctcctagaacagatacttggggggcggcggtggggggttgggtggacaacaaaacccactatacagtaatctaaaaacacctactgaactttttctggcatgatcaatagaacgtgtactttaccagagaaaggtttacagtcctgtacttttaccagggaaggcttaagtctttaaaacagattatgtgagaaaattgatgctacgtactaccggaagaagtaaaaaggcttaagatgagagttggagtattgttatatatgccaaaatcaatgagttcatcgtcaaggcccacattgacattttttcttacagttttgtaacatgaatgccagttgcttgattggaataaatatggtgatttaatcatgatgccaaaacagctaggaaaattaaattcagaatcttaactcttacgctcatagatgctatcattgtctctgacaatgaataccttcttccaaatattgataatatgtcaaatattacgtgtagattaactgacatgtagttaggtgtcattataatgttctgcgatttctcacaaaagtgtttttaccacctaacatggaaactccttaaggataatttatttttacctcatagcagctagaacaatggtgaatatattatcgaatgacatttttgagaaggccaaatctcgaaaatatttagccacctgaaatttgggggttaacttgattttgatgaacatttcaggtaaattatttgtgtacttcctgggatctttattttctgcctaaaagattgcctattgctgagattctcttagattatcatggtttaattagataaaagttaattttgattaccgcaggtaaaatattactaatgaaaaccacttgaatatatttgagttttgcttagcaatactatttttacatcatggcaaatggcccattttaattaggtctttgctaatttggcttcaaattctattaaatagagaagtctgtaaaataagtttcacatcatgagtgagttatttgctggaaatagtgatttagttcagtgttggattttataacacttgtcttcacaatacttatgatatagatagatacaaacagggtgatttgtccaaggttatactactaacatgtatcagatataaggctaccatatagccaaaggttataacatcttatcaaatgatccatccttatgaactttcctggataccatcaactctttattagtgctttacttttaatttacttccccccattttaaacctttcctctccagcaaactttcttccctcttcattctcaggatatgacccttaacttctagtttataaaagaaactagggccatctggctgaacaaagattcagaaagataccttaaaatgctgcagagtatttaatttttttcaatgaatgagctgaaagtgaggaaattcttcagaggcaagaaaacacacacaagaagtgaatgcagaatgataaagtaacacagatgtttgtcttggggttaggagtggttattggctgctttctgctggcttaaagcctggattttaattttatgcattgggggtctgagaaggtgacattgagggcaataccttatggtgaggtctaatcagagactttgttccctccatcttaatcccagaattctcaaagtatttatcttcggtggatgggctaggaaaaataagcagattctcaaaggttgatgatgggctttgtgcttatctctgccttggttttgggtgaaggaggtacaaattgggaaagaaaagtcttccctgagaatgcacaagtttattctcacaaaagtttgaaacctgaattaacaccacttctgtgaccttggaggaaaaaattaataaaacccaacctgaaaatgtagtttagaggtatccaggcttggtagtaacctcaagaacctggaaggagcaaattcaaatcattcgttgagtataatttaaatacagaatcctgacagataaaatttcacagaacatgagctcaaagtgaaaaattacagaatctacctacaaggtttaaagatattacagtgatcaaatacatagtataaaatattcattcatgtgaacttaagtaaacagtattgacatgatttttaaaagttaactaggcacatttggaaataaatcatttttagattaaaaatataattaaaaacaaatgagtggttaaacaacagattaaacaattaaaaagaaattagtgggggcacctagtttgaacatctgactcttggttttgactccggtcatgatcttagtgtcatgtgattgggctccacgtgcagctcagagtctgcttggccttctctccctttccctctgccttgccccctgctcacgtgccatctctcttgctccctctctaaaataaataaaatctttaaaaaaaaaaaaagtgaagatctgagaaaaaatcacctcaaatataccccagaaaataaataaaaaatatgaaaaaaaaggattaaggaagaatgaaaataaacagatccaatatatatctaactgaaatttcagagaaattgttcaaaagaataatgatttagagtttgcccaaacttacgaaagacaccaagtttcacagtaagaaagccccaaaaattcaagacagactaaacgaaagtgaacagagagtaaaatttgaaaataacaatgacagcatattttttaaacaagtagaattaaaataaaaaacacaagaaacaagtgttggtgaggatgtggagaaaaaggaacccttatgcactgttggtgggaatataaactggtgcagcaactgtggaaaacagtatggagatgcctcaaaaaattaaaaatagaactgtcataaccagtaaccttaccactgggtatttactcaaagaatacaaaaatattaattcaaaaaaatatatgcattcctatgtttatttgcaacattatttataatagccaatacatggaaacagctcgtgtccctcaataggtgaatggagaaagaaaatgttgtgtatatataaaatagaatattattcagcattaaaaaaacaaatcttgtcatttgcagcaacatggatggatctagaggtataatgctgagtgaaataagctgagtgaaagacaaataccatatgatttcacacatgtggaatctaagaaacaaaacgaatgaacaaagggaaaaaagagacaaaccaagaaacagattctttactatacaaaactaatggttaccagaaggaagtgcatgaaggaatgggtgaactaggtgaggggattaagagtacatttatcacgatgagtactgagtaatatataaaattcctgaaccattatattgtacaactgagactaatagaaccctattaactatactggaattcaagtaaaattaaaaacatattatctattaaaaaactttaaaaaaaactagacggagaagatattacaaaggaagagaattagtttgagggttgacatttcattaacaacaaaaaaaattcaggacacagtgaaaccatcaaaatgctgaaagagagaaaccagcaacatgaaattccacccacaatgaaactatcaacaataagggtgaaataaaagccttgccaggaggaacatcagcaagatggtggaataggatgccacggaccctccttccccctacaaacataccaatttggcaataattcataaatctcctttgtaagaaatccagaaactaattgaaaggcttctgtcccctaggtgaaaacaaaatgacaatcaccaaaatgagtaaggaaaccagtccctgaccctagtgcaataccgtataacgcttcttttcagaggagggaaggtgtttgttcattcatctagcagcctaagttttcccaagtgattccccagatgtcaagcttctgtctgtccagccttggagctctgatgggtccaatgtggtctaaccacctagaggaaaacaaagacagcaatttaaactagtaggagatacagctcccctcccaaatttcagcacagaccaaaccagaactatagcttcctttattgccttcgggaggaagagttggtagtggcccccagaatctctggacaagctgaatggtgagagtcttctatataaagacagtctctgaagactgaaagaggtgactgttttgtctgttgcatagacaccaacagagaaagtgaagaaaaatgaataatcaggcaaagatgttccaatgcaagattaagtcttcagaaatcctaaagtgttacatgatttgcttgatagagaactcaaaataactgctataaagatgctgaggtcaagagaaaaaagcatgaacaaattcaacaaagcatgagaatttcaaaagagaaaatattttaaaagtgtgagagagacgcctgggtggcttagcggtttggcgcctgcctttggcccagagtgtggtcctggggacccgagatcaggtcacgcatcaggctccctgcatggaatctccttctccctctgcctgtgtctctgcctctgtctctctgtgtctctttttttttttttgaaaaaaattttagattttacttatttatccatgagagacagaggcagagacacaggcagagggagaaggagattccatgcacagaacctgacgtggactcaatcccaaggctccaggatcacaccctgggccgaaggcaagagctaaactgctgagccacccagggatcccctaaaaatcttttaaaaattaaaaagtataaagtatcagggatccctggatggctcagctgtttggcacctccctttggcccagggcatgatcctgaggtcccaggatcaagtcctgcattggactcccagcatggagcctgcttttccctctgcctgtgtctctgcctctctgtctctctgtctctcatgaataaataaataaaatctttttaagaaaatataaagtaaaaaaaaaataaaaatatgaaacaaatcatggagctgaaaataacaaagtctgatgtgaaaaattcatttgaggggttcatcagcagactagatcaaatggaagcaaggatcaatgaactcaaagacaagtcactggaaataatttagaagagcaaaatgaaaatagaatgaaaaaaatgaacaaagctaaagacttatggtacactatcaaacagaccaatatatatacactgagtcccagatggggaagagagaaaggaccagaaagcttattcaaagaaatggctgcaaacttcccaaatctggggtagaaagtggacatccagatccaagaagacaaaaaattattaaaaagaggaatccaaagaaattcacaccaagaaaaattataatcaacttgtcaaaagtcaagatgatttttgaaagaaaagagaaaaatagagacttatcacatacaagggaatccctataggaccataagcagatttttcagcagtcttacaggccagaaaaaagtgggatgacctaattcaaagtgccaaaagacccaccatttgcttcaacatggatggaactgagtgaaataagtcaatcagagaaggacaaacattatatggtctcagtcatttggggaatataaaaaagagtgaaagaataaagggaaaaggagagaaaatgagtgaaaatatcaatgagggtgacagaacatgagagactcctaaatctgggaaacaaacaagggatagtggaaagggaggtgggtggggggttggggtgactgagtgatgggcaatgaggggggacacttgacgggagcactgggtgatatgctatatgttgacaaattgaactccaattaaaaaaaaatttaagtgccaaaagaaaaatactgccaaccaagaataaaatgtttttgcaaaactatccttcaaaagtgagaaaataatgacttttacagataaaggctgaaggagttcatcaccactagatctgccttacaaaaagatgctgaaaaatatcacaatagcttaagtatgaaactcttggtaaagttaaatatatagacaaatacagaatactgtttcattatgtttttattaaatcacttttgattccagtataaatgtttagaaaatagtattaaaataacagttaaaatgttaaaagatacacaaaataaatagatacaaattgtgccaacgaaaaatgttaaaggggagaagttaaagtgtagagttttatatataattgaacttaagttattatagcctcaaacttactagatatttttttgtccactccaaggtaactacacacacatgcacacataaaaacatatagaagttatacaatagaaaaaggaaaaggaatcaaagcataccaatacaaaaaaatcaacaaatcacaaaagagggcagcaagtgatgaaaaggcaacaaagaatgacaagactaacaaaaatatcaacaaattgcagaagtaaatccttccttattaataattactttgactgtaaacgaataatgggcacctgggtggctcaagagttaagtatgtgactcttgatttcagctcaggatcatgagatcaagctctgtattgggctccatgctcagcagtgagtctgcttgagattctctccctctccttctgctccacacacacatatacacacacacacacacacacacacaaataaataaataaaatgaattaaactccccaaactacttagagttgctaaatggattgaaaaaaaaaataaaagactcaactacaccctctacaaaaagctcactttaggtttaggtatatgcatagactgaaagtaagtgaagagatagaaaaaaatattccatgcaaatagtaaccaaaagagagcagtggtggctatacttagacaaaataggcttttagtcaaaatctgtcataagcagaaaaagccattatatattaataaaagggtcaatccaccaggaagatagaacaattatatctatactcaacttcaaaagacctaaacatacaaagcaaatattgaccaaactgaaggaagaaatagacagtaataccataatagaaacttcaataccccattttcaataacggatagaatatccaggcagacgatcaaaaaggatcaaagcacttaagttaacactttataccaaatgggcctaacagacatatacagaacattttacccaataacagaatacacactcttctcaaccacatatagttctttctccagggtaggtgacatattaaatcacaaaataagtctgagctaatttaacaagattgaaatcatactgaacatcttttctgatcataatgaaattaaactaggaattgataagatacttaaaactggaaaattcacagctatgtggaaattaaatagcacactcttgaacagccattgggtcaaagaaggaaataataaaatatcctgtgacaaaggaaaatatatcaaaaattatgtgaacaaaagtagtactaagaagtccgtaactataaatgcctacattatcaaagaaaaaagatctcagataagcagcctaactttaaacctcaaggagctacaaaatgaaacaaaacaaactaagcccaaagttagaagaaagaaggaaataacaaagatcagagtagaaatagagaatagaaaaacaatggaaaaagtcaatgaaacagtttttttaagatttaaaaatctttgacaaactcttagctagaccaataaaaaaagaaaattagcaagagacattacaactgatgccacataaataaaaaggatcataaaagactgctatgaacaagtaagtatacaccaacaaaatggatagatttctggaaatgcacaacttaccaagactgaatcataaagaaacagaaaatatgaaaagacctatatgtgatatggagagtgaatcaataatcaaaaatctcccaatagagcaaaatttagactaagatgatttcactggagaactacaccaaacatttaaggaagaattagtaccattttttctcaaacacttccaaaagaaaattgaaaggatacttcctaactcattttatgggtccagcatcaccctgagaccaaagccagatgaagacaatgcaagaaaagaaacctggaggctaatatcctaataaatatagatgcaaaaatatgagtaaattgaatccaatcatacaataaaaggatgatacacaaagtaggatttatctctggcatgcaaaaatggttcaacataggaaaatcaattactgtgatacaccacgttaacagaataaaggataaacatcatgtggtcctttcaataaatacagaaaagtatttgacaaaatttaacatttttttgtgatagaaactctcaacaaagtaggaataaaaggaaattacctcgacataataaaggccatatgtaaaatgctacaagtaacatcatttttatttatattttttacatcatttttatatatcttcagatattgcctaatttcccttttgtttttgtttttttgacccaaccattgttcaagagtgtgttgtgtaatttccacatagttgtgaattttccattttcatttctgctgttgaaaaatataagcaacataaaaacttaagtatataaaatataagggaatacaaaaagtcatcattcattgaatacaactcccaataacagggtacactttctttttattgacacatggaatatttttagaaattggtacaacctagaacattaaagcaacattacaagttagagatggtgagacagtgattaagagtgcatctagggggatccctgggtggctcagcagtttagcaactgccttcggcccagggcatgatcccggagtcccgggatcgagttccacatcgggctccttgcatggagcctgcttcttcctctgcctgtgtctctgcctctctctctctctctctctctctttctctctttctctctttctctctctctgtctctcatgaataaataaataaaatctttaaaaaaaaaaaaagtgcatctcaacacttaccagctagctgtgcctatgctccatctccataaatgggtagtaatgtctatcctatagggttgctatgaggactaaatgatatcaaattcagaaaaagtaattatgaaaaataactacaaatatctctcatgaacatagatgcaaaataccatagcaaatcaaatccaaaaatatacataaaagataacatatcctgaccaaattttatccccagaatgtaacattggcttaacatttaaaaatcaaatttaatttaataaaccttattgacagtgtaaaggagaaaatcatattatctcaatagatacagaagagaatttgacaaaattcaacaaccgtgattttttaaaactcaacttttagcaaactagggaaaaggagaaactcctcaatctaacaaaaaacatccacaataaacctacagccaacattatacttaataacgaaagattaaaagattactcccacacctggctggcttaggtctagagcatgcaactcttgatctcgggatcatgagtttgagccccatattgtttgtgaagattactttttaaaaaaaggagaacgattactccctaggacaagaagaaggtaacttcacttgtcctagccattatgctggagatcctagccattgcaataggtaaggaaaaaaaaaaaaagacatacaaattataatgataggggcaccttggtggctcagtcagttaagcatctgcctttggcataggtcatgatccagagttctggaaccaagccctgtggcaggctccctgctgagtagggagtctgcttctccctctgcccctctccctgctcatgctctttctctctcaaataaataaaatgttttttaaaaatcacaaagacagaaaccaaaaaaaaaaaaacaaaacccacaaataatctaatttaaaaatggcagaatacatagagacatttctccaaagaagacatacagatggccaacatacacatgaaaagatgctcaacatcactgatcatcagggaaatgcaaaacaaaaccacaatgagatatcacctcccacctgtcaaaatgggtaaaatcaaaaacataagaattgtttttttttaaatattttttctttatttatttatgatagtcacacacagagagagagagagagagaggcagggacacaggcagagggagaagcaggctccatgcaccaggagcccgaagcgggattcgatccccggtctccaggatcgcaccctgggccaaaggcaggcgccaaaccgctgcgccacccagggatccccagaaataagtattgttaaggatgcagagaaaaagaacccttgtgcaccattggtaggaatgcgaatagtgcagccactgtggaaaacagtatggagcttcttcaaattaaaaatagaactaccatataatccactcctaggtatttacccaaaaaatacgaaagaatactgggtatttacccaaaaaatataaaagaatacaaaaccactaatttgaaaagataaatgaacccttgtgtttatcgcattatttataatagccaagacatggaaatagcccaagagtccatcaactgacgaatggataagatgattgatgaatggataaaaaaagattttatatatatattccattgtgtgtcttacccataaaaagaaagaagtcttgccatttgcaacaacatggatggatctagagggtataatgctaagtaaagtatgccaaagtaagacaaaatatatgatttcactcatatgtagaatttaagaaaaaaaaaaaaaagagaaaccaaagagaacagactattatagagaacaaactgatggttaccagagggtgagtgtggggggtgagggatgagtgaactaggtgaaggagttttagagtacacttaaacaatgatgagcactaagtaatgtatagaattattaaatcactatattgtacacctgaaactaatatatccttgtatattacctatactaaggttaaaaaaaaatttttaattagaagaaaaggagcaaaactctccagttgtaggtaacatgattatttagatttttaaaaaatcctaataaatcaacaaaaagttgtaactaataaatgaatttaagaagcttgcagtatatgactattttatatactagcagaaaacaattggaaaatgaaattaaaattccattaacaatagtgccccccaaattaaaatacttaggaataaatgtaataatagatgtgcaagtcctctacaatgaaaactaaaagctactgagagaaattaaagaaggcctaataaatggcaagatataccctggaaagttcattatttttaagatgtcacttgtcctccaaattgacctatatatacaatgcaatccccattaaaatatcagcaggaatttttggtagcagttgccaagatgatttaaaaatgtatacgggggtgcctgggtgactcaatcacttaagcatctgccatcagttcagattatgatctcagggtcctgggattgaaccctgagccctccatcaggctccctgctcagcagggagctggcttctccctctccctctgctcctcccccaccctcacccccactcatgcagtctctctctctcaagtaaataaataaaatctttttaaaaatgtatgtggaaacacaaaggacttataaatgaaacaattctgaaaaagaagttggagaagcatattacctgattataagacttactgtaaggctacagtaatcaagacattgtaatagtgggcaaaaatagacatatagataatagagcagaataaatcaaagtcagatatttatttatttacttacttacttatttacttacttgatttttttttaccgtgttgttccaggttcattttatactactgtgttcctccttatccctcaccactccaaccatacttagcattctttcagttctttgtatatttccttctacccccaaacctttccatattcttttccctcttcttggaatattatttcctttgcttagttaaccctcagctccagagtgacatttcttcaggaaagatttcacccaactatccaaccagattagattccaaaattatagactctcagagcactatgctcctttccttcatatcattcacacgtttgcaactttgtatttgtgtgatttatgtggggagtttactgaactgtgtaagcattatagaaatagggaccaaatctgttcatgctatatccctagtagctaagttaatacctggcatgtattaggtgtttaataaatattcattgagtgaatgaaaccattgttcaccataccttaaatattctggggtaaaggaatccctgaatatataatttcacaacagaactttctctacccatgttttcttttttatattttcctttatctacctcctcatctcaaaaagaacatttgctttaaaacagaggtacctaattcaaatgcctagagaatcctggacactaccctttgagagataacaggatggtaggtgagtgtagtcaactagacagctcatatctaaagagaacagccacattaattcaggtccagctgtgagctggcattgcaaaatcatcatgagaaatcaaaattttgaatttatttatttatttttaaacattttttttttgagagaaagaaagtgagagacagagcacaagtagggagagaggcagagggagaagcagactccctgctgagcaggaagcccaccacagggctcaatcccggggctccaagatcatgacctgagccaaaggcagatgcttaaccaactgagccacataggcacccagaagtttggatttttttttaatgggaaatctactttttaataatgacagagtattgaagtattgttcaaaataccacagactaacactggataagtcaaacaaaacattttttttaagagtaagtctttttttattattttgtttatttatttgtgaaagacctagagaggcagagacataggcagagggagaagcaggttcttcacagggagcctgatgtgggactcaatcccaggtcctgggatcatgccctgagctgaaggcagatgctcaaccactgagccacccaggcatccccaaacaaaacatttcgtaggtaaaacccaacccatgggctactaatttgtattttcttctccccattttacttctgtgttatcttgcttaaaggaacaaaacaagtcagcacaatcttgtctttataatttccatgtaacaaagctgaattatagttaatactcattaacattagttaaaatgaactgaataatttgcacttttacttaagggaaatttacagtgttctgagtctgactaaatataaagaaagtaccacatatcacatgacataccattgatgtctgcctccctccactacactatatattatttaggtcagccactattgtacatatattttgaaggaaattttgcatgtgcttaagcgtctaatactgttatgtatgtgatcaatgcattgatttggacagttgaacaaattcacggaacttaaatgttttcttctatcttcacaagaaaatcagaatctctaactcagcaaagtataagttttcatctaatttgttttaaataaagacaaacttttataaatcaagtgtccttgttatcttctaattttaactttgtttagagatctgtttaaagtagtgtaactttagtagccctgaactagaagtctgatcatctgagttctagtccaaagtctgttttacttgactaattgatgtttaccaaatcgctactcttctgggccatttgtttaatttgtaaagtgattagtctccttgatatccaagacatctttaattctaatagtctgacattaataaagcaatctagaatttaagggttttatttttttaatattttatttatttatttcagagagagaatgtgggggggtggaggaagaaggagaagcaaactccccactgagcagagagcccaatgtagggctcaatcctaggaccccgggatcataacctgagctgaagacagatgcttaaccaactaagccacccagacgcccttggaatttgagggttttaaaaaagaaaaactgttcttaccttatgacctagttctaagatttaatacagtgtgaattgtgagttctgagttgtgaatacactgtgaattctgtgtgatatgaatgtcaattttattttttaaaagattatttattttagagagagagagcacatgagcagtaggggcagagggggagagagaatctcaagcagactttgcgctgagtgtggagcccactgtagggcttgatctcaagatcctgaagtcatgacctgagccaaaaccaagagtcagatgattaaccaactgcatctcccaggagtctcatgaatgccaattttaaaaagttatacctatcatgttaaaactaatcaaagtttggtttgtttaggacataagtaaacatttagaattacttgctttctaaaataagctccggctggatacttcaaatatatgtgttacaattttttacaaaaactcagttatagaatgcctgggtggttgagtgtctgctttcagctcagggtggggtcccaggatggagtcccacgtcaggctccctgagtggagcctgcttctccctctgcctatgtctctgcctctctctctctctgtatctctcatgaataaataaataaaatcttaaaaaaaaaaaaaactcagttataggtgccatttttaatagcacattgagcacactctagaattttttttcagcttcagtctcagggtaaaaatgcttaagtaggggcacctgggtggctcaatcagttaaacatccaactcttgatttctgctcaggtcatgatctcagggttgtgagattgagcagaggtcagctctgagctgggtgtagagcctgcctaagatgctctctctctgtatccctctgtcccctctctctgtttccctctgtccctctccccttcccactctattaaaaaaaaaatgttaagtaacattttcttaaacttttttgctctttccttcagttattgtataggactttattcaattgctaatggaaacacttgggctaatttgaggtgattcgatgtcctctggggaacttttctgtcataccatggaattagaaagtgttaagctaatgtaattacgttatgttcaaactgattttgttcaaactgttgctgcttttaacaaaatcaagatgaaaagaaagtaagcgcagtgttccttctgttccttcctttcctaggttattctattgcttcttctgatatattctgcctattttttctccaccattatcagtcagaccaatattctccaatgaatctggctctatttttctatcttttcaaaaagcaatctgctatcttcctagttcaaaaagcatgaaaggctttatgaaaaatcagtaatatacaatgggggatttggtattagaaaaacctttttaaaggataaaacagtttcaacacaaattcaatttaaatcagtttcctaagaagtctaaatctataatgagtgagactctcagttcagaaatagattctgtatattccttaacataaaatatgttaaattatcttcaaaaagctgtctatactaaactaatgaagagtccatagtaatctattatatttcagggtgattcttgataatgaaagctcacaaatttttcttctcattcataaaactaatacttcattcctggataattttatttacgcttttaaaaatacttatggttaagtaaagggtgtggtaaaggaccttggtaccatccaaaacaacacaaaatgaaggtgttaaactgcttcaggtcattacattttactaaacaatttggtttctgaatacatttttcttggacctttcaattcttcaaatcttgaacaactaacaagtagttgctgtgacatatggatgacaccactgttaataaagcagtatttgtcaccttaaaaattagggaattaaaaaaattagggaattaacttgaagtatatataccatcacagaccaaaatgtgcaaatatattaaagaaaaccaacattcctatgagtcttgaattaggagtcaggacacttggattttaatcctttcaatttcctatgtgttccttaacaatgcatttaatctctaaagctcatctttgttatttgtgaaattaaattattggattaaatcccaaagtttcttttagtacagaagagaccagggacaagctctggttgtcctctccaggcagagtcttacatatagcatttattctacaacaatatatgacaacacctgtgaagtattactaactgggagagcttacctaaggcacagtgtccagggtttttattgggaggtcagtgatgtaagcatggggtgtctttggggcagacctttttttcttaatctccagcctcctcaaagatcaaagttggtaccatttgacccagggtttccacaataaatcacattattagcatagattatttggtgtggcctgaggctctaggtaaacaaagacattggtatcatggaggatttatgaattaccttccaagagccagggaagggcctttctttgaaatatgcagagttaggcagctcaggcctcctgagttaatcattcactgcctatcttttgttcagcgaagtaatcctccagtaccttcttgagaaagggtgcttggtaagcagttttttgagacttttcatgtcaaatatttttattctgtcatatttgattcatagtttagacagctatagaattctaggttggagataattttccctaaggattagggaaaattaggaattatttcttcatatgagtctgttttctatccattttgatggacattgaacaggctctttcaatttagtcacatatatccttgagggatacattctttaatttttcaatgattttctctcctcctttgtttctgctctttctggaactcctaacatttggctgttggacctcccaagacaaatccttttacctcttctctcttattttctgtctttttgctctacttttttgaggtgatttcttcaacttccagacctcttatttttcatttctatcaacatatttaatttatatgagctcttttttagtctctgaattttttattaatagaatcttattttgtttcatgattacagtatcttatctttctattaaccataggattttttgtttaggttttttctttctgtatagttttctttttcctgcttgtttgatctctatctttaattaaaaactcttgagctatacttggatttttattcataattaagaatggaagctctaaacatgggtgagggatgtacacattgttgggtgatctgactggtcaacttgttagggaacgattgatgttggtaaatttgggtctttcctctttggatgatcagattcttcatggtgaaaaactactctaatcctttaaagaatagaggtctagggatccctgggtggctcagtggtttagcacctgcctttggcccagggcgcaatcctggagtcctggggttgagtccagcattgggctcctggcatggagcctgcttctccctcctcctatatctctgcctctctctctctctctatgtctatcataaataaataaattaattaataaacaaacaaacaaatatataaataaatctttaaaaaagaagaatagaggtctagtttacagcatttttgagaacctaattggggaagagggtaagagatgagagaattttgtacttggttttcattgttaaagtctctgcttttagtatgatgccaaactatcaactgtgcctggcatctaactttcatattccaggccagaggaatctctctagaaaataaacatccagatatctgtcaggatgaataaggggcatttttccagggcatggagtagtaaatagatttagggatttaactgccattaaatagtttttatctacctgttttagcaacccccattctcagtttcagtagtactttattttcttggctcctatatcttttgaagattctgaaatatatattaggttggttgtgaaccctactccctactgctttgggattcatcctttttggatagtcacatattctcttgggagtttccaagactatccttagccttgataatttgctagaaggactcacagttattatactaatgattatagtttattacagtgaaaggatacagtcaaatcaacaaagggaaaagacacatggagtaaggtccagaggaaaccatgcacaagcttccagcattcctctctcagaggaatcataggatatacttaattccttctgtaatgatatataattacacatgtgaaatgttaccagagaatctcattagaaactcagtgccaaagtatttttattgggattaaagcaggtaagcactctctgcctaagacataccaaaattccaggctcccaaaaggaaagtagatgttgagtatataccttactgtttgcacagtttaggcatgatgaaacacccttatcatttagggaatggtctgaatcctcctgaaatccaagttctcaaataccagccaaagaacaatcttacaaacaggcttttctaaattaacagtcttaagcatgctatgttaacttttctttctttttttttaagattttattcattcattcataagagacacaaagaaagaggcataggcagagggagaagcaggatctctgagggaagcctgatgcagaactcgatcccaagaccccaggagcatgacctgagccaaaggcagacactcaaccactgagccacacaggtgcccctatcttaacttttctgtacacacatgggcctgctttctagcttccaaatttttattattgtatcctttcccattctactcaaacttgggggtttatgccttttaagaaaatccctttatttattgttttagtggaatttcaggtgagaacaaaattacatatgttatattcagtattaacctggaattttgtttgactataaaacaaaacaccccaatttgattgtataacatcatttttaaacaacttgaaagaaaacagatgaagcagagagaagaaacttgtttttaattccagttagttaacgtacaatgttatattagtttcaggtgtacaatatagcaattcagcaattacatatatcacctggtgttcattgtaacaaatgcacttcatattctccatcacctatttagtccatctcacacccatttcccctctggtaaccatcagtttgttctcttagttaagattctgtttcttgatttctctttctctctttctctctcttttttttttttttccttaaattccatatacgagtgaaatcatatggtatatatctttctctcattttgcttagcattacactctctagctccatttgtgtcattgcaaatggcaagattttattctttttaatggctggataatatccctgtgtgtgtgtgtgtcttctttatccgttcatcaattgagagacagttgcactgctttcatagtttggctattgtaaataatgctgcaatgaacatgggagtgcatacatctttacaaactaatgtttccatagtctttgggtagataccaagtcatacaattactaaattgtagcatagttctatgtttaactttttgaggaaccttcatactcttttccatagtggctgcatgaatttgcattcccatcaacagtgctcaacagttcctttttctctacatcattccagcacttgtcacttcttttgctgtttttcttagcattttgacagatgtgtgtggttttgtattaccaatggtaagggatgataaacatctttgtgtgtgtatgttggccaatctatatgtcttctttggaaaaatgtctatgcgtatctctgcctatttttttggattattttttggatgttgagttgtgtaagttctttatatattttgaataataaccctttacaaatatcttcttccaccgcataagtcacattttagttttttgattgtttccttcactgtgcagaagctttttattttgatgtagtcccaatagtttatttttgcttttatttcccttgcttcaggagacatatttagaaaaaagttgctatggctaatgtcaaagaagttactgccttccatgatttttatgctttcatgtctcacatttagatttggaatttatttttgtgtgtggtaaaagaaagtggtctcatttctttcttttgcatgttgctgtctagttttcccaacaccattttttgaagagactttttttgccagtgggtattcttttctgctttgttgagattaattggtcatacaattgtaggtttatttccagattttgtattctgtactattgatctatgtgtctatttttgtgtcaatatcatactgttttgattactacagctttgtcgtattacttgaagtatgtaattacaatgcctccagctttgcttttgttttttcaagattactttggctattcaaggtcttttgtggtgccatacaaattttaggattgtttgagttctgtgaaaactgctattcgtgttttgatagggaatacattaaatgtgtagattgcttttaaaatattttaagaatatttgttcttctaatctatgagtgtggaatgtctatttctttgtgttgtcttgaatttctttcatcagtgttttatagtttatacagtagaggtcttccacctctttggttagagttattcctaggtactttatcatttttggtccaatagtaaatgagattgttttcttaatttctcttcctgctgcctcattattggtggctagaagtgcaacagatttctgtaccttgattttgtattccacaactttactgaattcgtttatcagttttagcagttttttggtgtagtcttcaggctttctatatagagcatcatgtcatctgcaaatagtgaaagtcttactttttccctaccaatttggatgccttttatttcttttggttgtctgattgttgtagctaggacttctagtactatgttgaataaaagtgatgagagtgaacatttttgtcttgctcctgaccttagaggaaaagctctgtttttctccattaatgatgatgttaactgtgagtttttcatatatggcctttattgtgttgaggtatattccctctaaacctaatttgttgagagtttttatcatgaatggatgttatactttgtcaaatgctttttctgcatctattgaaatgatatatggttcttacattttcccttattgatataatgttcttattgaaacccaggaataaatcccacttgatcgtgatgaatgatttttctaatgtgtcattggattcagtttgctagtattttattgagaatttttgcatctaagctcattagggatattgaccagtagttttctttttttgtgtgatgtctttatctggttttggtatcagggtaatgctagcctcgtagaatgaatttagaagttgtccttccttttctgtttttttggaatagtttgagaagaatagttattaattcttctttaatttattagtagaatttacctaggaagctatccggtgctgggcttttgtttgttgggagtttttgattacagatttaatttctttgctggttatctgttcaaattttctgtttcttcctgttttggttttggtagtttatatgtttctatgaatttatccatttcttccaggctgtcaaatttcttagcatatttttttaataatatgctcttataattgtctgcattttttttggttgctatttctcctctcttgtttgtaattttatttatttcattttttttcttttcctaataagtctggctagaagtttgtcaattttattgattctttttttcctaaagaaacagctcctgggatccctgggtggtgcagcggtttagtgcctgcctttggcccagggcgcgatcctggagacccgggatcgaatcccacgtcgggctcccagtgcatggagcctgcttctccctctgcctgtgtctctgcctctctctctctctctctgtgtgactatcataaataaataaaaattaaaaaaaaaaatctttaaaaaaaaaaaaaagaaacagctcctgatttcattgatttgttctttggttttttagtttctatatcatttatttccactctaatctttatttttcccttgcttctgctagttttatatttgttgttctttttctagttccataggtctaagtttgggttatttgggatttttcttgtttcttaaagtagtcttgtattattataaatttccctcttagaaccactttttctgcatcccaaaggctttgaaccatcatattttcatttttatttgttcctatacacttttttatttcttctcttatttcctagttcaccaattcattgtttagtagcatgttatttaacgtccatatatttgtagtctttccagactttttcttttggctgactcttctaatttcatagcgttatggtcagaaaagatgcatagtatgtctttagtcttcttgaatttgttgaggcttgttttgtgagctaatatgtgatctattctggagaatgtaccatttgcacttgaaaagaatatgtatagtagacttttagaatggaacattctgaatatatctgttaaatccatctgttccagtctgtgattcaaagctattgtttccttattgattttctatttagataatctatccatcgatgttagtggtatgttaaagtcccctactattattgtattaaaatcagatttgttccttcatgtttgttattaactgttttatgtatttgggtgctcatatgttgagggcataaatatttacaattgtcatatcttcttattggatcatctatttattattatatagtgcctttgtctcttgttgcagtctttgttttaaagtctagtgtgtctcggacacctgggaaactcagttaagcatctgcctttggctcaggtcataatcccagggtcctggcattatgtcaggctctctgctcatcaaggagtctgcttctccctttccatctgcccctctcctccactcgtgcactctctctcaaataaataaaatcttaaaagaaaaagttattagtatcctaagagacaaaaagatattatatcctatgtatcctagaaagaacaagctatggtaaagaaaaaatactttgaaggttaaaagaaagagttcttaaaaatgaaatataggcattgaaagagaacatctgaaagaagtccatcaattcaatttataactagaggagctaaagcctcatttttttttttaatgcgagcaatagcaacggtaaggttgaaaatggtgcactactcttcatgggaacttaagcaattgagatggaaactatgaatagctaggtctgtgaaagtaatctacatagatggatatttatgtctatctattcaccatggagaagagattatattcaccataattcatttttgcatcaattccgaattttccaataaagtatacatttgaacattccaatgaaaactccaataaagtttttttttcttttttttaagattttatttatttattcatgagagacacagagagagagagagagagagaggcagaaggagaagaaggctccacgcagggagccctacgcgggactcaatccggggtacccaggatcacaccctgggctgcaggcggcgccaaatcactgcgccaccggggttgccctccaataaagtttctatttgaagttaacaaaagtggaaaaatcaacttgacaaaaagaaattctataaaaatcattcgttctgtaaggatttcagtacctaccatttcgaagcaacatagttacacatgcaatgaaaaacaataaataacatatagttccagtttaactcttcctcaaatcttgggataccttcactaattaaacttacattagataacattcacaaataaaacgtatttgtcatactctgatctttcttccctttatttgaggaggagagacaaaacatggagttgacattttaaaatggaaaaacaattgcagataacttattagtattttaaggggcacctaggtggctcagtcagttaagtgtctgccttcagctcaaattgtgatctcaggattctaggatcgagccctccatctggctccttgctcaatagagaacctgcttcttcctcttcctctgccccacccctcgaacatgctttctcttcctctgtctcaaataaataaaatcttttttaaaaataggttaaaaaaaatttttaagtttttatttactcatgatagacagagagagagagagaggcagagacacaggcagagggagaagcaggctccacaccgggagcccgacgtggaactcgatcccgggaccccaggatcaggccctggaaaaaaggcaggcactgaaccgctgagccaccagggatccccaggttaaaatttttttaataggatcagcccaggtggctcagcagtttagcaccaccttcagcccagggcctgatcctggagacccaggatcaagttccatgacgggctccctgcatggagcctgcttctccctctgcctgtgtcactgcctctctctctgtatctctcataaataaataaataaaatctttaaaaaataaaataaaataaaaaattttaataaaagtatgctgataacagtattttaaatatttattaattcaaaaattctaaatatttttttctgaattaagggccactattttgtgggagaaagatgggttatatgatgaaaaacatttgatacacaccaacccatataattcttcagactttttaaaaattatatttaaattcaattaacatatagtattttgttagtttcagaggtaaagttcagtgattcatcagttgcatataacacccagtgttcattacatcacatgccctccttaatgcccatcacccagttaccccatcccctcaccccattcccacaaccctcaattaatttcctttagttaagagtctcttgtggtttgtttccctctctgactccatcttattttatttttccctcccttcccctatgatcctctgttttgtttcgtaaataccacatatgaatgaaatcatatgataatttgtctttctctgattgatttatttcaattagcataataccgtcaagttccattcatgtcattgcaaatggtaagatttctttttttgatgactgagtgatattccattgtaattcttcataccttcgtaataaaaaaacaatatccttctataaatggcccatttatttagtttttctgatattaagaaacacctaggaagaagatatgacccctctgtcataaattgacatcagcaaggtacttagatgtatgttatttactattctaaacttcaaaaaaatctacgtaaagtacatgtttattatgtttcatgaacttcccttcactatcttaacaaataatatataattgcttgacttttttatattactaatttcttttttactcaagatcacattttattagctatatttataaatacttggaatctactcagatcattgtttttaaccttattatactctcagtgtgacttaagcacctggttgaatctatgatgcattgtaacattctgcatatctcagctgatagctgacctttaattctttccttattctgctcaactccgtctcatgcccattatttatccctgtatatgatctgtaatcttattacacttcccaccctcttcccattctgttcttcatttgaaacttttaaatgccttcactaaaatctagctttttccagatcacactttgtatataaggataagctccccccatctcaattttgggaagaacaatcagcctatattatgtttcccagtactacctactgatattgtactatcatcatccctgaaatccatgccatctgattaggtcatcattggctataataataacttccactttcctggatgaatcagcttttctttcttctggcctggtctactgttatatagatcttctttcaaagccgatattgataatccatccaatgtgtctcaattcaatggcttcttagagccctaaaaccctccccttctatttgagccacccaacagcaaggccacaccttgggtcgactattgcaaaagaagcagggcagcccaggtggctccgcggtttagcgccatctttagcgctgcctttagcccagggcctgatcctggagtcccgggatcaaatcccacttcagcctccctgcatggagcctgcttctccctctgcctgtctctctctctttctgtgtgtgtctctcatgaataaataaataaaatctttaaaaaaaaaaaaaaagaaaaagaaaaaggagcaagtctttctaaccagtctttctaacctcttttcccttaaacatcttggaatcatccttttatctgtttttcaccctcatactaacttttgattactttaccacttctgttttctctactccgttttcttccttgtgatgtcttttgtacttagaacctatggtcaatctagtattccccttctttgctttatgctgtgacaatatagtttactcacccactttttctttctctatgatagttttacatcttacaggtttaaattattacatgaaaaatgaaatctagttatttgaactttttataacggcatccattttttttcctattaggttgtttcaattttaaaattaggaaatcttgcagactgtatccactgtcaactacctgactttagctggacctatattcttctcaatatattcctttataacccttctgttcatgtgttccaaatgttttccatattataagtgcttaaatctaacatcccttcccaggatatgaccttgcctcctactttactagaaaaaaatagaatccatctgcccaattctctcatctatcttctctatatcaaaatgattatatccatgctacatccaaatttctgattttaacagagctggtttatagattattctaaattttctctgcagacttcctactttttcaagtgtctcttctaacctcttgactcaaaagtatgttttccttttcagggctaaccaacttcttttagagccttctttaacaattgaactctcccttcctctcccctgctctccatttatcatttcactatctctagtttatctctggccagcagattattaaatcagaaactgaaaagtctgagactttaccttacttgaagctaacagattagcttgccacagttatatatacatatactgacagaaaacgcaaggcccatgggtcagagaaaaagaccatttattactcatggcaaaaacaacaaccaaagtaatatcttgcatcaggtcattagccccaattcccacatggttaacacagtaagggcctgatgttatttgtgcctgcagcaaggtatgttacagaggaagaaccctgaaatgaaaggaggcggacagtcagatcttatctttactctggaaagtaaacaaggaaggataggaagaccatcacctgccctcacacctgaatatctccagagagggagatattctctattcttctagtcaggaaacaaatcttccctctggacttaaggtagacaccatctctatttcaaggatgtttgctatgcaaagccctttgctcagaagacctataccacgcagaaatatgtaatattcatagagaaatatttctcaacatagattttcccaggtttcccttaacttcaaatatatctcatatggcctcttcccactgtcttaactctattaattcatcgtactttttattctattattccactgaaaaccattttctccaaggtacccatgacatactggtaactcaaccaaatggtctttttcttaatcattcttgactttttgtggaatttaacaaagattatacttgctttctattacctctaaactgctatgcaggggcgcctggctggctcagcagttgagcgtctgccttcagctcagggcataatcctggagacctgggatcgagtcctgcatcaggctccctgcatggagcttgcttctccctctgcttctgcctgtgtctctgcctctgtgtgtctctcatgaataaataaataaaattttaaaaaataaaaaataaactgctatgcagttttctatgactgtctcctttgcctatctcttttcttccctctttgtgatttttcattctgacattagatgtgaacatatcacagggtgactttctattccaaattgttctctcaaatgtcttctagttgaagtttcagttgtcacttctgtaggtgattgtacttccttcttatattcccagtcacctaacttctcaaaatttctgcctatatgtaataaattttaaacctaagaatcaattccacaatctgactttttgaaatttttgtcagtggggcactcattctatcaattctttactatttttttaagaatgaatgtattcgtatgcatagcaatctacatgcatctccaaagaatcatggtgagtgaaaaaatccaattccaaaaggttatatactgtataattccatttatatgacattcttttcttttttatccagtataactatgtacagtgttatcctggtttcaagtgtacaatgtagtgattcaacaattctgtacattactcactactcattacaataagtgtactcttatatttcatccatccttccactcaccttccctctggcaaccactaatttgttctctgtattttctctgagagtctttttttgtttgtttctttttttctttgttcatttgttttgtttcttagattccacagtgagtgaaatggtatttgtctttctctgaaacatttcacttagctgaataccctctagatccatccatgttattgcaaatggcaagatttcattgttttctatggcagagtaattttccattatatacatataccacatcttctttatccattcatctatcaatggatccttgggttgattccatgtcttggctatcgtaaataatgctacagtaaacatagaagtgcatatatcttttaatattagtgttttcatattctttggataaatacccagtaatgacattactagatcatatggtaattctacttttatttattttttttacttttaattttttgaggaacatccatcctgatttccatagtggccataccagtttgcattcccaccaatgttgcacaaagggttccttttatcccacatctcaccaagatttgttgtttcttgtggttttgattttaggcattctgacaggtgcaaggtgatacctcattgtgatttcgatttgcatttccctaatggatgagtgatgttgagcatcttttcatgtgtatgttggccatctgtgtgtgttctttggagaaatgtcttttcatgtcttctgttcatttttaattagattatttggttttgctggtgttgagttgtagaagttcatatattggatgtatcaattgcaaatgtcttcttccattcagtagattgcctttttgttttgttgatggtttcatttgttatacagaagctttttattttgatgtggtctcaatagtttatttttgcttttgtttcccttgtctgaggagatacagctagaaaaatgtagctatggctaatgtcagagaaattactacctgtgctttcttctgggatttttatgttttcaggtcctcacatttaagtctttagattcataacctgaaaaggtggttgagtagactcactcaaattcaacagtatttattaactagagttcttcccaccattctaatccattttcaccactttacctaagaaatcactcaaacataaaatcgtattacagaatttgtgggagttaaagactaattctttagcctttttctacaaggcttccgtgactgagcaactgcttgcccctccaatttcaacttgtgttgtatttcacatatcagaatacttgctttaacctaaacccactgctcatttattccaacattttctgaaaacttactatgaaccaagcattatgctaggcactggagctataaatatgagtaagttatggtctctcttaagagggaaataaaaatgtaaataaatgccataaaatgtgactagtaaagcaaggatacagagtggtgtttcttttcctaagtcacttaaggtgacagtataagagatgacacttgagtaaagtcttgaaggatgagttggaatttgttatatgacccagaaagctgatttcaggtaaagtaaaaacacacaggaaagcacagagttgtgaaactgaatcccttatttgaagagttgtaaataatccaaaatgaccagaccatgagattgaagatgggataaaaagatgaagtaatgggaaggtagggtgggatgatgaaagacctgttatgtcgaaaggagtgtgagctttgtcctggaacagtatcagatttactttttaaaatgaaaatgctccattttaagaaatatatattcagacaatagatgccaaaacaaatggatgaaagtttgaataacagaagatatttatattgtaaatatttctccatgtggtactcattacaatgagaaaaatgctaacttagtggagaaacttggtagacactaccttaaccaattgctcaaagtatcacaagaatgggacaaatcaacaccatgaaactcctgatgtaattcactgagaagaacatagcaccatcatttctgtggtattcctaccaaaatgcatatcctgaatctaattatgaaaaaacagacaaattcaaactgagaagcatctacaaaatcactgtaaatacaaagggaaaaactgaaaattaaaggaggttatattcacaaattagcacataatcctggtattttttcctcccataaatggcattattggaacaaaaggcgaaatctaaataaggtctggaaattagataatagtattatatcaatattcaattttataatttttgtaattatattgtagtcacataagagaattttattttttaaggaagtatacattgaattacatatttagggttaaagaagcaacacacatacatacaatttactgtcaaatgatttttttaatcatataaaaacaagttcatgtgtagaatatattgtttatagcagcattactcacaataccaaaaaggtggaagctactcaagtgtccattgatggaagaacagataagcaaaatatgatgtatacatacagtggaatcttattcagctttaaaagaaaaggaaaatgtgacatgagttataacatggatgaactttgacgacattatgctaagtgatataagccaatcacaaaagaacaattattgtatgattcccgttatatgaggttactagaatagtcaaattcacagacagaaggtagaatggtggttgtcaggtgctggaggagggaggaattaggagttattgtttaatgaatacagagttttagtttaggaggatgaaaaagttctggagatggatgataatgacggtgtacacaacaatgtgaatatactttatgaagtttaactatacacttaaaaatggttaaatggggggcacctgggtagcatagttggttaagcacctgactcttggtttcattccaggtcatgttctcagggtcatgagatctcccatgttggactccaagctcagcatagagtgtttaagtttctctctccctctctcactgtgctgccctttctctccccctctctctctataaaataaatatgtaaggtttttttttaatgattaaagggtgcctgggtgcctcagtcagttaagtatctgcctttggctcaggtcataatctcaaggccccaggattggctgtcaggccttctgctcagctggaagtctgcttctccctctccttttgcccctccctcctgcacatgcatgcacacacatgcacagaggcacatgcacactctcaaatgaataaaaaaatatattttaaaaatggttaagtgaaaaaaataaaaatggttaagtggtgagttttgtgttatacatattttagtacaatttataaaataagaataattaaaattaaatgtagacaggtgagaataaagaaaaagtagtaaaatgaacccttaccttctaaagatataaatggagtaaagaatggaagcagagagaccaaataaaaaggtgttgtaatatgtaccttagtagtggagacagagaaaatggatatatctgagaatgattaggaaattaataggataatattttagatgcctgtatcacatctagcttctgggttaccaaaatacacagatatgggtacatgcataagctactatctttgcctgagcatttacctaacaccaaatttacctaatttgcccttcataacttggttctggcttaaatgtgatttcctgagaagtcccccctgactacacagtctttcccctttctccttacctcacaccatttcttggactgaattagtctttctcccttcttagatgaggtgatagcatcttttgcattgataccacaaagtatcagaataagtggtttatctatttcttcagtacactgagcttcttgggagtagaaagttactatatttatgaatccacagcacctttcataatgtatgctcaataaaagcttgaataaaattagtaagttattgagtacttatactatttttctttatactgttttatacttgactctttccatgcccccaaagttaataccttatctaaatagtcctataactagtctttttactcctctccttgcccaaatttcctctgtactagcctgtgcattgatgccagattaatgaaatttcatattttggagtgtctacataaaaaacttcagtattggggatccctgggtggctcagcggtttagagcctgcatttggtccagggcgtgatcctggagtcccagaatcaagtcccacatcgggcttcctgcatgcaccctgcttctctctctgcctgtgtccctgcctctctctctctctctctctttctctctgtgtctcttgtgaatgaataaataaataaaatctttaaacaagcaaacaaacgtcagtgtcttctcattatctaaataaataaagtccaaattcactagtaagaaattaagaccttccacactatgctctcagaatttaccatgttcattttattcaacaagtatttgagaacttaccctttgcaaggctttgtgaaggaagaaagtttactaaatatatatgctcattatctttgtgttcattttttttggtcccttgtttccttttactacttcatttcatcttagggaaaaataatctttttttaataaatttattttttgttggtgttcaatttgccaacatacaaaataacacccagtgctcatcctgtcaagtgcccccctcagtgcccatcacccattcacccccaccccccaccctcctccccttccaccacccctagttcgtttcccagagttaggagtctttatgttctgtctccctttctgatatttcctacccttttcttccttcccttctattcccttgaaaaataatctttgaagaacattcagccatattcatttttaagtaagtagttccattttaagacaaaatgtaagtaatataatgaagtttaggtggtaagctatccagcacaatgtctggctcataataaaagttcaataaatgtttcatttattctgcttaaaattttaaagatagaaatttaaatttaagactataacaaagaaagttattactgacttaagcctttggaaacctgcttattttgcttcatggtagttcagatgttaatatttgaatttactgatctaatgttatttggaacatattatttgtagttgtatcacttgaaacacaaagtcaaaacaagtttatgaatactatattacaagtgttttttcaaaacctttttctatactttctttataggttatatgtaaagtcagatgtgccactgaacttgacaaacacaagtaagtttcatgagtagcaagatctaatttttttcacaatagacttctcaaggtagaagggcatggtagttgaaggtgctgtagtagttttataggaagtccagtagttagattagcacatgggaaatgaattgagtaaccacagttctcctccttcagccatattgctgcttaacaccttcttttgctgctctgctactgtgctgctttagatgtgagatatagtttcatagggcccacacatactaaagttagattttactgtttggggcaagcatgtatagaatagttccatgaattaaggaatgtttcagtactgattaacctcaaaaatgagaatgctaagctggggagtcagaaatttgggtttcagaccaattctcccactaacttgttgaccgtgcaactcatttagcctctctaaatcttggactcccctggttatatgaataacttcaaggtcccttttgggttttaaattacatattattacttatgtaatctgaagagaatattaagatataaacttcaccaactaaaatctttatactttgtacacttaacaaagattgcttgttatagattacacattaccttcaattaacctcttataaactatttccaaaggtcgacaacattttatgatttccactcttgaaagtgacccaaaatagaagatatgaggatgccaaataaatttctggctcatattaatttaggttataaacatatttgaactgggaatagatagctgttacagctacttaatacaaatatctacagcttacctgaaaggtaagatcactttatgcagtgatctcatttttcttagggagctacagttaaggcatttcattttcagagttgctctgtatgcatagtaagtataactttataagaagctgaggtatcaatgaggtgcttgaaactctacatatactgtacctatgttcttctttggtgatgtttgaaagtaatggttactatggatagtcagaagatcataaaagttgaacattatttaaaacacatttcccttaacctcttaaaactaatgttagtgatcaatttaaatttagatagagtttattaattttccaagcagattataaaagcctggtaattcttagaatggaaaggtaaatgaacatatgtttagtagttataaaaatgaaaagtagggatgcctgactgggtggctcagcggttgagcatctgcctttggcttaggacatgatcctgtggtctggggattgagtcccacatcgggctccttgcatggagcctgcttctccctctgcctctgtctctgcttctctctctctgtttctcatgaataaataaataaaatctttttttaaaaaatgaaaagtacaggattactttaattagtattaaaataatcttatattattcttcctggcatggacaactaagttcaagtccacatgtgattatccttaaattaatgttttaaaacctaatgccatttttaaattgcttagatattaattccataatagcaaagatatcccaagtaactctgagtcattattaaatttgtatttaaatgaaattataaagattttaaactgaaggtattattattgtatctgaagtaacacactaattcagaattaaatctagtctctcattagtatataaacatctaataaatttattttttttctttcagaattctgttgcatttgggctttatattggcaagccttctttttttagtggtgaacttgacttgtgcaatgttagtccacggagatgtcccagaaaatcagttgaaatggactgtgtttgttcgagcattaattaatgatagtctgtttattctttgtgccatctctttagttagttacatatgcaaaattacaaaaatgtcatcagcaaatgtctacctcgaatcaaaggtaagtatatttcttatatttacacctgagaatctaacttcaaatcctcatcctgtgaagcatattttaatggaaagcttatgtttttttaaaacatattctgaatgtaaggtacatttttgagtttgaaagaatggtcacaagacattaaaaggcattcaaaacttggccctaagtaatagtttttttaaaagtttgtattgaacatactgttattttctgtgacttatatcctctgcataggaggataaatgaaagaaaccaggatttacatgaatatattataaatggtctaatatataaagccacactaacaacttaagatttcgtcagtaagggtggcaatattgccattaaacaaatttatcagattatgtctacatacctttgggttagcagtgttaaggtatcatatgtctaagatggtgtttatttgtatcaggattcagaaaatgttacttcacctcataatatgaagacacaattattttgaaacaactaatcatgtaattaaatttataaatgccttgcttctgcctttccttatactttggatcagcaaacagaggccaatgctaacctattaacaaagaacaatagaagtttctacaatcgattgaccatgttgttgagcagtgaatcagtcatcacagtgatatatggcactaggtgtgtggtataaatgtgtagatttgggggtgtgatttatacacacacaagcttgctttaatttggtatcattatctattcacagaaggtaagcaagatagtgtcttaaacagaacagttctctgaaatatagttagacttctgtattgtcatctctcatataatcctagtgaagtaaggtgctttaattaaatgtatggtaaccaacttgtcctttaaatttaggaagagactttaattttattttttaaacatgtgtcagtagaatgcaggataaatatagaaatagaaacaaaaacatatatacagagagagagactttcaaacctattaatcttacctagaaaattattttattccatttatgttctaaaaagttcccaaaatgtaaatgtttttgctaattctggcttcagtgtaagtgttaaaaatgataatgtcactgttacagtatataatctttggtgtagcaatagcatctccacttaatgtaataatatcaccataacattcataccttgtgcttatctagtgataaacagataaatagatgtggttgaatttaaaaggcttcctctctggatatctaacaacttttaaagttttggtttatttgctttgaaatagatatttctgtgaatatagtaaagtttccaatctaaaaggaaaatctaatctgataactcctccagaattattttaaacatcttcccctatcatataaaaggtattgacttttttattagtataattgtagaagtcttacatttaaaaagtgtgtggattcagaattctctaggaacattacagagagacatgcttaaaacatacttcaattttaaaggtaaacataatatgaaacactagattatttgtatgacattgtactattatgtagttcttggtcttcctaactaggttataaagttatatattcaaagagtacatcatcttgctttcatgttctcctagtgaaatcactaggcccatttttattgtttgacctctgtacaggaatagccatttctttcattcagtcgacaaatataggttgaacacctacctcttccacgttcaaaccaactttgcttcctactgtccctaagaacatttccttaaagctcaaactttggtcttctgtttttctttttattcttcattccttcttaatgagatcttccatgatttgtttcaattaaatcttacctaccttatttctaaatggcatacaatattctttcctgtctctatatccttaggctgtttcattttccagaaatgtctctcctctacccggggctctatacctgttgccatcatcttaaccaaactttgaaggcataactctaatgtttccccttttaatgaacttaatttgattccttcctccttgcttccaaaataaaatttagaaataactatctgaattctctataaaaaacttatttttattcagttagcagctagcacagtgctgtgtattagttctctttttcaaagtagcaactctaacaaggtttttaaatattagttatcaattttgaggatccctgggttgctcagtggtttggcgcctgcctttggcccagggtgtgatcctggagtcccgggatcgagtcccgcgtggggctccctgcatggaacctgcttctccctctgcctgtgtctctgcctctgtttctctctgtgtgtctcttatgaataaatgaataaaatctttaaaaaatacattagttgtcaattttaatagtttatttcttctctttaatttttaaattttcttacatatttaaggtttttactttgttctttgtctatgttcttatatagatacataatttattattttgtaaactaataagatatttacagcaatatgttttctctagtactgctttggcagctttccataatcatgttatatagtaccaacattcttatttaacaaaaacaaagaaaacattctgtttcaatttcagtcatgactccaacattacatatttacacatcaatgtgaattagatattgtctttaaatatagggtcttccttcaacttattttggtggaaagtctaaaattcagacatctaatcctattcaggtcccctgaccttcctgagaagttatcagttttaccctctgtttgactgtctatgcatataaatctggcctactacacaatatagaatttctgtactccaggttcttgaaataaactctcaactgttaaattcaaaagcttcattccagaaaggttacctgaagaaatgtctagtctttccatctccctatctattctacattttatctttagtccagtccagacgttttatacttaagattacattgtaccatggatagaattaattgtctgttctaacctatactttgacatcatgctttggcctgtactaagaaatatgtaagaaacatttatcttgaaagccactattgtgtaatgttcttgaggatattgtctacacagtgttgtgcagaaaatatctttttctccagctcagtaccaggtaaaacaatattgattaaatccttcttttctctggccactatgccattcagaagcaaatatgtggctcacctctatatcaatcatagatgaccttatgatatccactttgggttctggctctatctctagttatatttcatttttttattccccatcaccatcacacacatacatattcctgtatatttttttattttgtattcttctctgtaactacttcaaattctccttggtgaatgagggtggtataaataaaaaatatgatattggattatatctttggatatgtttatatcttttttcagatatattaattttaattaatttggaaaggccttagtgagagacaatgtatcatagtgatgaagagccggaaacctgagatcaaagaaataagaccataaatctcatctcctgtttactggctatgtggcattagacaagtaacagtatctctaagcttcactcagctgatctgtaaaatgaaaataatgatagtgttgatctgataggttatatagagtttttaggtatgtagttttagatatatatactgtacagtatagatatatatagtatatctaaatattagatatatttagatatagtatatcttaaaactctatactattagagtaagaatagtatcttctaattaatctaaggattaagtgaaattttatgtaaggcattagtataatgcctagcatttgagaaatgcttataaatattagctattatgatctaacatgtactaaggaatggtaatgtacttttgggaagttcttgaatatctgaaattgttggcaaaatttatctagagagaggtcctatatacgtaatcaatcctcaaaaggaacagagatccagaaaaaaataagaatcattgaagaaatgaatttctctttaaatatttaattttaattttaatgtgactccacctaatttatgtaccattccacacagattttgataagggttgaagtctaacaggttacatgttatctaatttttaactagcttccctttcaaatttttagaacaaatactactgaaattatgtaatggcatttttaatcataggtatttttgttctgaaatgtgctgtatcttttattacaacttttttctttatttgcatggtcatgaaatatgatgctatcttaactttttatctattgcaaacattttaagtgtgtctcattagtttaaacaagatagagttgttgggtctttttttttttttttttttttacaaatcctttatatggtaaacagttaatatttattgacatgattgtgtgttagtattggtctcccattaggtttttttattgctgttttctttgccttcatttctatgatttctgtgctacatttgaatttatttaatttttgtcagaattataacttaacattattaaattattatttatcattaaaatgcataatgatggggctcctaggtgggacagttggtttaatgtccagctctttattttggctcaggttgtgatcttagggtgatgagatcgagccctcattgggctctgggctccaggctctgggctttgggctcagggtggagtctacttaagactctctccctcttgactcctggacggctcagcggttgagcgtctgccttcagcttagggcatgatcccagtgtcccgggatcaagtcccaaatggggcttcctgaatgaagcctgcttctccctctgcctatgtttctgcctctctctctctctctctctctctctctctctcatgaataaatggataaaatcttaaaaaaaaaaaagactctctctctctccatttacccctgcccccagcttgcactcatgctctctctctcaaataaatcttctaaaaaataaataaaatgcatactgataaaattatttttattctaatattcctttccatttcagaaaaataagaatatttataataacatagaacataaaaaaagaacatagaacatataccatttttaatggacaaaataacttaccagcacaaaaatttttaaactaatgttgagggatccctgggtggctcagcggtttagcgcctgcctttggcccagggcgcggtcctgaagtcccaggatcgagtcccgagtcaggctcccggcatggagcctgcttctccctcctcccgtgtctctgcctctctctctctctctctctctctctctctatcataaataaataaataaatctttaaatctttaaataaataaataaataaactaatgttgatgtttactccctgtaatgacaggttggtattatctgtataaaagaccactcaaagacaaggtgggaataaaagttaagcttttaggtttatatctctggtcagggatatgctcaatattatatctaggtaagagtgtaaaaggaatcattgtctgatacttaatatcagatcagcttatctcccagcccagccagccatttgcaaataatggattctctctctctctctcctgaattcctaagttttaattactatgtaaacctttctgtccaatgttcactcaaccctttatgcatattaatttaatatattggaatagaaaacagcatcaacatcttgcagagacacagtgactttcgatttcactgatatttctgatctttcatacagacgaactgatcctctaagaccaaagcagtgttttgtggtaatttaagccataaagaaatagtctaaaatactatgagtgtctttcttccaccatcctgaaatatgatttaacccaaatttggggagcacgatggcagagaaatagaggctgcaccatcctttgtaatagatatgattaccaccttcccaatattttgctctaatttctctcctgaattataaggatttactctatcatcttaagatgaggcacttctttactttactcccttcatttttccagttcttttataccccaagtcttacttcctattatgttacttccaccacatacttgtcccatttttaaaaatccataggagccagagatctaatttcatggtctttgcaacatgaaactatttttgaaactcttcagagtttataatcatcaaaattcacttgacccttgaacaacaaagggattgggggcactacccactgcacggtttaaaatccatgtgcaaatgggtgcctgggtggctcagttggttaagtggctgactcttgattttggttcaggtcatgatctcagggtcctgggattgaaccccatgtaggggatccatgctcagcgaggaatctgcttgagattctctctccctctccctctgcctcttcctccactcattgtatctttcaaataaataaataaatcttttttaaaaattaaaatccacatataattttggctcccccaaaacatcttctaatatcattgtattttttaagtatagtggacacactgactcccccaaaatttaactattaataacctactattgagtagaagccttaccaataatataaacagttaaacacatactttgtatatgtattatatactgctataataaagtaaactagagggggaaatgttattaagaaaatcataaggaaggggtgcccacgtggctcagttgtttaactgtctttggctcaggtcattatcctggggtcctgggattaagcaccaaatcgggcctccttgctcagcaggaagtctgcttctcttgctccctctgaccctcccccttgcttgtgctctcacttgtgtgcacgctctctctctctctctctaataaataaataatctttttaaaaaatcacaaggaagagaaaatatatttacaatactatataatattaaaacaaaaaaatctgtgtttaagtagacccatacagttcaaacctgttgttcaaggatcaactgtatatttttttcaactgtatattttttaatttactaattgctattcctttgttttcttattgttgatgcttagtttggtattttaatttcaaaatggaaatagcatttgtgagatgatttcaaaaaaatatatgtaggattttgcttctggtaatgacttagaagcttctattggacaaaccttccacagatagcagtgataaattctggacaaaatataaaaagcactgaaggcactggagaacaaccacttagaagaaggaaatgacactgagtaagtttcctgttttttacagcttctagcctgagggaagttctcatccatggggcagccaaaacttgaagagaaaacctctgttttacttgcctgaagaatcagaagacaaaattcaagtaattaccacatatggaaagtgagtggggaatttcaggaagaagacagccagagagaggaagacacaaattttgatgataaattcagcctaattataatctaatacctaaactacacattagcaggacagaattcaagagccacagttaaggatatttcagctctccatgcttaggggtagtttggtatttgagtctagcaaagttaatttttgcttaaaaaaaaaaaaaagaaaaataagtactttcagaagagtataacagaatccagactctttaaaatacatcattcacaaggtccagaatacaattcaaggttattgggtatatgaggaaacaggaaaaatacaactcatgctcaaaaagcaatcattggaggcaatctcccttccagatgacttagatgttcaccatatcagacagagattttatagtatgcttaaatatgctcaaggaaaatatgctttgataaataagtcaatagaaatcttaggagaaataaaaactattaaaagaaattgaagaattaagaagcacaatatttaaaattaaaaagtcatcagttgggcttaacagcagataggagatgaaagaagaaaaagtcaatgaacttaaaacaacaaagtatccaatttgaaaaacagaggagggtgaggggaagatgataataaaatgaacagaatctcaggacctaagtatgtgttaggggaatccccaaaggaaaagagaaaatgacattggaaaaaatatttgaagaaataatgattgaaattttccgcttttgatgaaagacataaatttacaattttatgaagttcagcaaccccaatcaggataaatataaagaaaatattaaaaaagaaagaaaaaaaaagaaagaaagaaaaagaaaagaaagaaaaaaaagaaagaaaaagaaaagaaagaaaagaaaagaaagaaaagatcattgcctaggttcattattaatcaaagtgcttaaaaccaaaaataaaaagtaaatcttgagaacagagaaaactgacacatagataaaagaacattgattcaaatgatcaactacttctcatcagaaataaaggaggccagaagatgtggaaacatcttttacatgctgaaggaaaaatgtggttaactctgaaatctatatccaatcaaaatataaagaatataaatcaatcaaatccaatcaaaatatagagaatataaagaatgatgaaaaataaaagcatcttccaatagaactaagagggttagttaccaacagacctgaattacaagaaatgttaagaaaattctacagactgaagggaaataaagtcagcttgaatttcatctgtccaggaaggaatgaagaacacaggaaatagtaaatatgtgggtaaatataatttcttaatttctaaaaaagaaatatgactgggcaaagcaaaacttataatgtgaggcttacatatgtacatatataattctctatatagtatatataacaaccatagcaactacagaataaaggacaggcaataaatgcatccatatggttgcaaatttcttacattttctgtcaggtggtatgatattaacagactgtgaaaagttaaggatatatcttatcatctctagagtagtagttctcaaactttgtgatctcaagaccccattacaaccctgaaaattattgagaaccccaaagagctattgtttacataaattatatctacttatatatacattgttagaaataaaaattgagaaattcaaaaaatatttgtttattcacttaaaataacaataataaatccagtatagcatgtttttatgaaaaataattgtattttccaaatcaaaataaattagaagatcaacattgttttacattttgcagatatctttaatttctgacttaatggaagacagttggattttcatgtttgcttctgcattcaatctgttgtggtatgtcctttaagttgaagtatatgaagaaaatcctcacacatatatgtagttgaaaaatggaggagaattttaataaccttttcagataattgtgatattcttctttaatactataccaaaaatctgaagtggaggtttcttgaaggttagttgccatgtgaaatctaaaaccatattagtgaactttctgtactaccatttgtctctcttgctgtttgaaagatggtgtagcatcgtgcattgatcattggaagatactggtcacagattttcaaaatgatgatacatttcattgaatattctaattcatgtttgttaatatcacctccaacctcatcagaaaggtgtttaagttttcagaagctgccatcccagtcttatcatgaacataagtgcttacaagttttcaaaaattctaattttaatttgaaatatatatttcaccattgtcaatagtgtcatatattttccttgaagtgacagactcatttcatttattttcaaaagaatatatatccagtaaccaagtgtgaataaccattgtttgtctttcatagttgtctgttaagtaaaaaatggtgttctgaggaaaaaaatggctacttcggctcacaagtcaaacaaccacataagtgcttttactcaagacagccacaatacctcagcatgcagtagaattgctttaagtgtatgtctcatctcatcacacagaatgttaaatagacacaaactctggggttggtaattaaaattttcagtgcttcatcaaggatattcttaagtgaaactttttttttttttaactgggaatgtgacgcagtaaagaatactacacaatttggtatcactgctttgatttgtgctaaggcccagaagttttagttaccattgcttttgcaccattagtgaacatatcaacacaaatgacccacaataaacaatcagaagagttttcaacacttaggatatttcaatcacttatctttcttctccagattgccctaaaagaatatcttcctgaatgattagctggtcctgacaccaaatgaatatgaacaaaattagtcctgctacatcaggttcatttatttgtaagacaaaaatataaatctgtagacaaaatattagactctttgttttcagttaaatctttaaatcagtgaatttctgtattattggaaaatggcaatgtcataatttcctgaatggacttcccatccagtaggcattcagcaatgtcagctgtgtaagaatttactggtttctcagctactgtgtgtgcttcattagccaatgtagtataataatgtagcctgtgaaatgtttgaatgactttttcatttctggtttggaaagttataaaaacaatttttggtattttaaaaccacacctgcatttaaattttccattccttttgcttttaaactctgaatgattggtctcaagatgatgctgtagcctcattgggccatatactattcaaaacgtttccgtcatagaagacacaataaggtaaattattaacatttgcaaagcctattgaaagataattttcattacattttatttgatgaaacaaaacagaaatcaatttcatccagttcctttgaggtagattcctttctttattgagtcatagaattctaatcactttcatctttttcagcatcttagaggtaaacagagatgtgtgttgagaaagatattttttattgtgatagaatataaatattattttttaagtgtacagttcagtggcattaagtatattcatactgttgtgcaaccatcaacactatgtatctccagaacatttcattatcccatactgaagctctatatccattaaaaattaattccccattcttaagccaataattcattaatatgaaaaaatattttttcattttagagtaatatatgattaatttataaaacgagtttaacatcaaatttaaagttttttaagttttttgaagaaagttcttaaatattgtaaaacaaatctatcaggagtaccaattcttgtacttccatggagatacaaggatttcaaaataactacttattgggtgataatgaggtttcagcagatacagcaggtataaccaaagaaacctagtaagaacccagtaaaagtaaaagaacaagctaaattaatctctgaaaatgcacctatttatacgctaatactattataataggaattcgagaaaacacaagaatacacatgcacacaaagtgttgacatcacttagtctggaaaactctgttgtacattcaaaagagaattacagtacaataggtaaataacatctcagtgtctttgttaaatcatttttttaagtcattttgattttggtctttaaggtcccttgaccacactttaagaactactgccctagagcaaccatttaaggcaaaaacaaaaactagtgaagaatagttaaaaatccaaaagataaatgaaattctaaaaaatattaaattaacccaaaagaacacaggacataagagatagaggaaaaacaaacaagaccaacaacaaaacacaaaagggacaagcagaaaaacagtaaaatataaggtctaaatccaaacatatcaccaattatattcaacgttaatggaccaaacattcccattaaaaagtagagactgtcaaaatggcactttaaatataaaaaaagatacagctatcaaaaatagacagaaactacgctgcattcagtatgcataaaaggccctctaacatcagataaaatagacttaaagacagaatattaccagatataaagatacctttcatcaggaagcaaagaatataaccaaatataaagaggtacatttaatcagaaagagataaaaattataaatatgggcattaaggaaggcaggttttgtgatgagcactgggtgttatatgcaactgatgaatcattgaactctacatctgaaattaatgatgtactactatatgttggctaattgaatttaaattttaaaaattataaatatgcacatgaagccaaaacggtagggaataaagtagaaaaaagatttaccaaataggaagaaatagtggaggtggggaatctatacaattatagttggagattttaatgccccaccctcaacaattgaaaacaaagtatcagtacaaaaactctgaacgacattatcaacccctgagttaattgactctcagtaactggagaatacacattcttttcaactgagcatggaaatggtcatcaaaataaaccatacagtggaccataagacaagtatcaatacattcaaaagagttggattcagagtgttctcttgccataatgcagttaaatatcaataacattatgatatctaaaattccaaattatataattccaaattatacaacatagttctaaataactcgtgggaaaaggaagaaatcacaagggaaattagaaaatatttcatatagaagaataatgaaatacaatataccaagaattgtaggatgttgctcaaaatagtgcttgaagagaaaaaatatatccttaaatgctatatattagaatagaagaaagatacaaaattgtaacctaagacttcaccttagaaactacaaggggaaactaggacaaagttaatttagaaaagtaggcaaaataagtggaaggatgcaataataaagataagaatagaaatcagtgaaacagaaaataacaataaagaaattaaagccaaaagttaattttgtgaatagatcgacaaattttgtgtacaggaaaaagcagagtgaaaaaacaaactgccaataccatgaataaaagagagaatatcactatagatattactaggcattaaaagaaaaatgaaggaatattatgaacaactctgcgtgagcaaatttgacaacttaaaggaaatggacaagttgctttaaaaatacaacttaaaaaaaatacaacttaacaaattgttagaagacaaaatataaaatctgaataaccctgtgcttattaaggaaatttaatttgttatcagaaatttccctcaaagaaaactgtttggttcagatggtttcactagttaattttatcaaatacttaaagaaaaaataatactaatattaaacagattcttttgaaaaaaaaaagaaggaacactttctgatatatttaatgaggacagcattactgtgataccaaacttgacaaagatattacaaaacaaaaatcacaaactagtgtcctttatacttaaagatgcagaatctaagcaacatataaaaaggataataaatcatgaccaagaagagtttatcccaggaatgcaaaataggtttaatgtttgaaaatcaatcaatttaattcactacattccgagaagagaataaaacaaatagcaatttgaatagctgtagaaaatacatttgacaaaattcagaccctccttgatttaaaacaacaaacagaatatagaatattaggaatattcctcgatctgataaaaggcatctataaaaaatatacaatgaaatcatacttaaagtattgttttgtccctagggttgggaacaaagcaaggatgctccttctcactatttctactcaatattccaagaaaaaaaattttttaagtataaaattggaaataaaaaagtaaaactctttaattgcagacaacagaattgctttggtagaacatcttaaataactatatatttaaataaataactacttgataactactagaacttatgagtgaatgcagcaggttctcaggatacaagttcaaaatacaaaaattatattgtatttttatataaaaataaatatatgaaaaataaaaattaaaaaatataataaaatattgtatttttatatatagccaaggccagataattagaagatgaaatttttaaaaatacacatttatattagcataaaaaaacaaaatacttcagaacaaattttccaaaatacgatacctctatactgaaaaaactacaaaatattgctgagagaaattaagatttaaatcaatggagacaattgctcatggattggaagatgcagtattgttaagatggcaattcttcccaaaataatctacagattcaaagaaatcctaatcataactctaccatgagtttctttaaaacagaaattggcaactttattctaaaatttatgtggaaatgaaaaggacttaaaaatacttctaaagtagtactctaacagaactttgtgcaatgatgagagtattttatatctgcattattcagtgtggtaactagccatgtgtaacatttgagcacttgaaaggtagctattgtgacagaactgatcatttaatttttaaaaaattttaatgcaattaattaacatatagtatattattagttttagaggtagagttcagtgattcatcagttgcatataacacccagtgctcattacatcatgtgctctccttacgcccatcacccagaaccccatcctcctacccacctcctctccagcaaccctcagtatgtttcctgtagttaagagtcctttatagggagtgcctgggtggcacaattgatagtgtcagcctttggctcgggtcctgatctcagggtcctgacctcagggtccaatctcagagtcctggaatcacactgggcttcctgcttagtgaagtgtctgctactccctctcctctctttctctctttctctctccctctccctcagccccagcctccccttcgtgctctctctttcgttctttctctctctctctcaagtaagtaatttattttaatttaatatgaatgtaaatactcacatgtagctaatggctattatactgaataatggagaaggaaacccttaaaaagcaggggacttacactacatagctttgaaatttagtataaagctacaataattaaaacactgtatgactggcataaaagaggcaaacagatcaatggaacagaatagaaagcctagaaatcaatccacatttgtaagatcttttgatttttgacaaaagtactaaagcaatccaaagggaaaatgaaagctttttaactaataaggctggaaaaactggatatccatatgaaagaaaatgaacccctaactccatctcaaactatacccatacaaaaaaatttttaaatggatcatagacctaaaaataaatgaaaatactctaaagcttctaaaagtaaatacagaagaatatttttacaacttgggtataagcaaagatgtcttgggtcatagaaagtaatcagaaggaaaaaattgataaattagacttaattaaaagttcaactttctcatccaaaaaaaagtctaagaaaatgcaaaggcaaaccacagacttcaagaaaatacttgcaatacgtatttctgacaagggacttatttccagcatatatagagatctcctacaactcaattaaaaaaaaaaacccaatttagaagtggtaaaagatatgaatagatttttcacaaagaagatatacaaacggctaataagccaaatgcagtcttcagagaaatgcagtttaaaaccaaaatgagatgctactacacatctaccagcatggctataattagaaagattgaaaacccctaatgttcactaggatgtggagcaactggaactctcatactttattggaagtgtaaaattgtacatccattttggaaaaagatctggtagtttcctctacagctgaacttatacctaccacatgacccagtaattccattcttaggcatttaccacaaagaagtgaaagcacatgctcacaaaaagattttataagaatatttatagaaaatgtgcatcaagagaaggaactgtcatagaaacaatctcatgtaattatacagtgaaattagtatgattaactgtcctggtttctttggggctgagaagttttctgggatgtgggactttcagtgctaaaactaggaaactcttgagcaaaccagaaggagttggtcattctaattatctacctcggcaatagaaagaccaaactactgaaatatccgacaacatggatgaagcagaaaacatgctgagtgaaaccacaagagttcatattctctggtcccatttatatgaagttcagaactaagttgtggtaaaaacagaagcagaagagtatacatttctgaggttttgggtgatgggaaggggtgtgagggactttctagagtgatgattatattctctgctttggtagagatttggctatactggtatacacatttatcaaaactcagtgaatggtaagttgaagtttctgcatatctgtatttaaaaatacctgtaaacaaatactgaactatagtcaatgacatgcataccaatgtgttaataatatgcatcctggagtgaggtgtaactcatcctttgtctggaatggaattactgaaaaagtggtgtaggtgtcagagatagaggaagggagaaagataccttgaggattgctcctgagtagaattgcctattatgactctattcattttaggaagattttctttaactttttgacaacagcttccatttgttttgttttgttttgttttgtaatcctgtactttgcttgaacaatcttaatttgttttctaaattagtgggcttctttcattgttatatgtatgtaatctagctgtaattttgttttattttattaatagcctcagtattattgattctttgctcttttctcacgacttttttagtttttatagtatttacaggtataagcagagtctttccctattatgtctttttagcagtcattttatttctctgtaaagttacttatgattattttaaaggaatggtaatgcttatagcattctaacttcttgatacctaatgtttctttaataatatagtacttttaaaattggatctggattggttttagattagcttttttattaacaacttttttggggattcacaaaaataaaaatgcacactgtagaaaattatagccttgactttagaaaattttagtcttgctagggtttatttattgtcacatatactttttgttatggtagtgagtaagctcaaaaaaggtactctttcaacatctttcaaggtatcttttatcttttagttcttcttatgtacctctaaaattgtggtgttcttataaagaaatcagttataataatcctcttaatcctaccaaacccatcatactcttctaagtatttttaataaactctttctatcctgcaattaaaattattattaattattaattattaatctgcctacaaacataacttcaaaaattcaacataattacccataatataaagaggaaataaaaggaaagtaattaacaaatatttcaatatgtaaattttgggacatgatgtactagtcagatgcttgttatctatacatagaaactgaatggggaacaaaaaaaaaaaaagaaactgaatgggaaactgaatgggacaactataaatacagattgttacaggggtattgtgttggtgccttacataccacacacagtattgttgtcagtttcatgattttctgaaatatttgaccattcttgataaagttctgaacaaaacaaaggaaaagttccctcagtttacatgatatatatgtgtctggaaatattggcatctgtttaaactatgcaaacataaatattatttatatataaaacaattaggttttggctcagatcattacaaacgggttttttaggtcttcatgaatatctaagatgatactggaaagttatgatggtcagaaaggaattctctcatgtggagaactctcctgaggattactgatcatctagcatcccccacccttgtgcgctaaatgccatcattgtgacaaccagaacataaactttcaaaacaccacattggtgttttttgcaatggggctctttggcaattgtgtcacctctccgaataatgtttgtaatgtttaagataaataggattaccaaggaaaccaattgttgaaatacaaaccccaggttacaaatccctgtaaaaaagatgatactacacttttctccagtacatatacttcaatagaatgtgagtactaaattgtgagtgaactaaattgtatggttttctatctggggaaacaattgaatccttggtattaaaatattatggatttgaacatgcatttgagtgcctatatcattttgttctcaacataatgacgtcattaagggactaacatcaactctttaatagaaagaagcaaataacataggagcttatttctattctaattttgtacctcattagaaattaagtgtatgaaatgaaataacgcttctatttcccattcttttcttattatgactaaactacttccctcattagtatcaattttgccaacttatttgctcatatattacttaagggagtaagataaccttggcaggacaaaatctccctccagctgccattaggaaagttgacaaattacttatttgtattaatagggtagtttaaacacaaattattccaagaataggcattgtaaagcaagataatcaagagtttatttcaataggtgctcactcagtattttctaagagtgcattgcaagaggtgactgtgttgtatctggataacagtttgtcatgacaaatgtgcagtttcatgatgatgagtttttatctcttctagggtatgtctctgtgccagactgttgtcgtaggctctgtagtcattcttctctactcttcaagagcatgttataatttagtggtgatcaccatatctcaggatacattagaaagtccatttaattatggctgggataatctttcagataaggtaagtagctaacttgtattgctaatcaaataatataataataaaattagccttaactaaggaaacattttaagtgtttgacttacaaacacttatctccagctactaacagtaatcataaagttctgtgctcaaaaatcctcatttacatgtgtcacttaaaatcattcttcagagagaacttctcccaaaggagtattttctttcttttctttctttctttctttctttctttctttctttctttctttctttctttctttctttctttctttctttctttccttctttctttctttctttctttctttctttctttctttctttctttctttcttctttctttctttctttctttctttctttctttctttctttctttctttctttctttctttcttttttgtagatgatactaatatttccataaacctattggtcatgaacctattttactaatttttcaaggatagtgtttaaatatctctagcttaggtagctcagtggttgagtgcctttggctcagggcctggtcccaaggtcctgggactgactcccgcatcaggctgcctgcggggaacctgcttctccctctgcctatgcctctgcctctctctctatgtctcttatgaataaataaataaaataaaaatatctctagataaatagattgcctgtcattagctagtgaatatgggtatgtttttaatttgtgaggatggagtttattctctcaaacccgagacctacatataacctaaatatttggtttggttttagatatttaagggatttttatgaaaattgtatattatcagtcatgataatgggagagcattcatagctccttgggtatccagctgtttgctgtagtaattcccagtattctatcatatttaacttcccagcattctccatccccttcctaagaagtgcagtttgacatagctacgtgtcatgtctttgtattaaactttgtactgactttaaggcattctggaatatcgttttatcagaatttcagttacctttctaaagaaaacagatttttcccccttctccaaggaaaggagttttctgtttttttttattttttatttatttatgatagtcacagagagagagagagagagagagagagagagagagagagaagcagagacacaggcagagggagaagcaggctccatgcaccgggagccggatgtgggattcgatcctggatctccaggatcacgccctaggccaaaggcaggcgccaaaccgctgcgccacctagggatcccggaaaggaattttcttatgtagttccaggtagcagattctcttcactccttttgccatttctctctcccaacatctagtagaataaaagcaaattcaatatgaagttgaggcccaaaagcatatgtttaaataacagcagagctgagcaacttaacatgtgtcatttctctacagatgtaactcagtaaatgctatgtagtatgttacctaagtagtagctagaaccagtagtttcttttttttaaatattttttttaaatttttatttatttatgatagagagagagagagaggcagagacacaggcagagggagaagcaggctccatgcaccgggagcccgatgtgggatttgatcccaggtctccaggatcgcgccctgggccaaagacaggcactaaaccgctgcgccacccagggatcccccagtagtttctttttaactgtctttagactatgcagcctaaaaatgagatcactccaacttattgatatattaaaatattttcataaattgatgattgaaaaagttaatagctttttattctatttaacatcaaagcatttttatgtcctttaaaggatatgaaaccactaaatatggaaaatgaatttagagatttatgtgcctatggttaatgtgttttaacttaccctacctgaggcaaattaattgtggcaggtgactgcttatacataaaacagatttaaaaattgctctatcatactctgtttacaggctcatatagaagacataagtggagaagagtatatagtatttggaatggtcctctttctatgggaacatgtgccagcatggtcagtggtactctttttccgggcgcagagattaaaccagaatttggtatgatatcataatattccccagtgcctgtttcccttatttttaaaaataatggaacattaaaaataataataatgaaacatttatgttgattttctcttttggggaaagtttaagactaaaaagcattatagatctcagcctcctttcttaaaaagtaaatcttcatatgttatctaatactttgttcacaggcacctgctggcatgataaatagtcacaattatagttccagagcttactttttcgacaatccaagacgatacgatagtgatgatgacttgccaagactgggaagttcaagagaaggaaggtagatatactagattagtactgaatagattggaaagaacaaatgtaagctttaacccaaatatgaaaaaaggggatttggtgacaaatgtcaataaataagatcacttaaactggattttagaaaagtagatgttacatccgtagtggggacctgtactataaagaattatcatctaactctaagcctatgcattacctttatttgagaaatacatttggacataaaatggtaccatctcatttcagaattccatgtttgttcaaagctggcagagcttggtgagcagggaaggaatacaattagcatgattatgtttccttatctatagtgctattcaaaacccactgagaaaccctacatgaaactctggggaagctgaggtgccacaggaaaacgtgtgtccttcttactctaaaaccattctcagttcatttggacagttacttagccgccttttttagcctgtttttcacttgtaaaatagtggtaatagaatttatctaataggattgttgtgaagtttaaataggtttgtgaagattatacacacacacacacacacacacacaaacatgtcttagaatacaacccagtccttagtaagcactatattattatctgataatcaagttctaagtcccgatgtatttattcttctgtactatgtcatataaaatcaaggatattaaagtcattacattttgtagaaagctattgtgttatttggcaaagaatgtatttcaatatatttgatataactgtattataaaagtcactgaacactaaacatgtcaatgtgacctatatcctgttcacaatcctgtggcttttttgccttttttgttgcagtttaccaaattcgcaaggtttgggctggtatggcaccatgactgggtgtggcaacaacagttacacagtctctccccacctgaatggacctgtgacagacactgctcctttgctctttacttgtagcaatttagatatgagcaatcaccatagcttgtatgtaacaccacaaaactgaaagcattaccaagccatgattcttccattgtttttcatgaacgtgtatattcaatgtgtttaaattccatctacattaacattccattatctgttgcaactgaaaacaaagcctagaaatgtggctgtgttcagcagaggacacacttgttatttttgacctcttcatagcaaaatgaagtaaaatgggaagtttggagtggaagaaaaggattgatggctgcaaacatcctgactttgaaacatcaaatgtgtatttgcatatttgcacttttatctttgttctgaaagagtacactgcagtccccaaagtcacactccagtgttcacactgggatactatattgtacacctaattaggaggcaattttcctatgaaaaatcaaagcctgtatattcagtggtatattctatgtagaattcctacccaataaaaattttagtgtgaacagtgcacaggattaaggttaacaatgtatcattcttttttaaaatctaaaaaacgtgtaatcattgaagacagttcttttaagcatgattttaagataccaactgaaattattcagtcatttttaaaagaccacagtaatcctttacagtgatgaccagcagtgttctttggaaagccacagccatttctacaagaagaaagtataccagtgaaaattatgtggctactttgagtagaattggtcaagtggttatttcatctgattaagatatctgtagtagtttaagcatgattcttcaagaaagcaatagtgatttttgcatagggagattttggtagaaacttcttgggactaaacaagtttacagatgtatttaagaattattcataaaatgtacaattctaagttaaaacataaatacatttcaaaagcattggatttagctgaacaagatatagctgattgtacctattgaatcaggattgtcctcaggtaaattaaatcatgatacattatggcagtaaactcaagtgcaatactttgtaagacatataattcctcctttagttttcccatttttatatcttatatatgggcaaagccagattaaatttaattcaaattaattccagcactaaataagcaaattgttgtaaaggtactaaataggtaagtataaatccactgtttaacaatattggaatacttctagaattatattaaaactgtcttgaatgtcctatcccaaatctaaaaatatatatatatatatatatggtaggctaaggtaataaaggatcttaaaatgcactttctaccagtgtctatatggaaagaagtagatgctgaatacctcaagatgccaaggaaacaggcaacattgggaagttgtcacatccttaaagatgagtagctacttaaaattgtctgctgacctatttcttcagaactgaactaatacaactgtccttttctgtcttctactttgattagaatgttttatttctactcttaaaatacctttcaatgaaaaaaataccattcaatgttttaataattgcttatttagtaacctcacacaagcgtaacaggaacaaatgaaattttaaatatttttggtcttttgagaggctggttcacagccaaagaaattccatctttttatcatacaaaatgactttgaactccatcagaagcataaacctatggttatatggttataaatgttactttgggtttgtttctaagttctctcattataaccaaattacagaagttaaccttgatatttacgtgacaaggtaacatgcacttaactgagtatattttgaggacaacttcagttattagatctttttagaatgccaactatttattttcctaataatgttgggtatctacctagaactatctgaaaagatgtattatctctgtgaatccttggggttcaaagtaaataaggtaaatttttctaaggccttcctaggtagcgttcctatttgaccagataagcaaagattacttttttaaaaaaaagattccaagtaaagtatcttggttctttcagctgcattagttgattcttccaaatttcagatttgtatatttattcttatcactgactagggtacctgaattcttgcatttgtctccttatacacatctcccacaatacatcaccaaagagaaagataagcttctggcccaatatttgcttaaaaattccaaagcactagaagcactttaagtttggtctcgaaaggagttgatgaaatcaaagggctaccgattccctgctcatcctgcactgaagcacatgatgacaatttcaaaccttttttcggttcattaattagaacagtgaatttcattgcttaagtgtgtaattctacagtgactagcagttcttgttttatcgtttcatttgggtggtcattaattttgaaactcttaccactcattatagctggttgtagttttatgaaaggtgtaatttatagctaaagtggcttttttatgcatagctgccttttttattgtttaacagtgtttctcagctatataatcagtttcaaactggttgtaaaagtatagctgtggccaatgaatgtatttatttgttgtttcactaaattgtaacaaaacactactgttaaaaataaaagtgtttgtgcttttatttggtggtctggttttcttaaatgtgtcaattgacaacactgagtttctagcacacaaggataagaaccctagtactaccaaagaaaggagaaaaatatcaggaattacaaatgagttagtgatcttgtatctggacatcacgtcccttaatactatacactgatttgacatgaactgccatacactttaaaatgcaataggatcttgatagtacatttattcaaacattaagctaagaaaaatctttgtatgaaataacttataacacctctctccttctccttgaattttaaacaggaataaatttagctagcccataatcttgggcagctattctttgattattcaagaaattcttcagtgatgttgctctttcccctgaaagaaggcttaccaatttttccataatagactcccacataacttgccaaaactacaccaaaaatttttttaaagattttatttattcatgagagacacagagagaggcagagacataggtagagggagaagcaggctccatgcagggagcccaatgtgggacttcaggatcatgccctgggcggaagggagacgctcaaccactgagtcacccaggcgttccaaaccacaccaaattttgaatgcaatttcagaaggagctttactgacctctcctggaagtccacaaatccttgggagtctattaattctttttgtaaggaatatttggagtgaaggtctgatctctaatgcaataaatttgtcatttgaaaagcagtttattcaacaaacatttattaagtgttcatctgccaaaaattatgctatggagatgcaaaaatggatcaagttccttttcctgcccttaaggagctcacattctaataaaggaggtttaaaagaaaatacagtacaatatgtgacacaatagaggtaggctgtaattacagtggtgacattaaagaggagattagagggtactccttgggtggaacaagggagatttcacagaggccaccttgatgctggcctgcaaggagaaatggaaacattccaggtaaggaaggatggctgggagcacatgatgcagagagagcagcatgcacccatgtgtggcaacctgaccccggcatatctgaagaattcagtgttttatcaaagcatgagggctgggcacagggctgggagacacacatcagtggaccttgttgaagtgcttctacaaagtctgctgtggcagcatcgtggggtgcaggagaggagacaggctggaatcagggaggcaggttagtgtagttttctagattaagagcaaagaaaaggaaggacagtaaagcattcaagatagggagatcaactccacagcgcttacacactgactggttagggaaggacaaagaggagtgagcctagagaatttagatgatggctctgaaattaaccagagtaagcaacacaggcataaaaacagatctagggggaaaagggttaagacacacaggtatctgtgggacaacagtaaagacgtggtaaacagattgagaaatacagactaatgataaggacttctaaaaaaaaaaaaaaaaaaaaaagaagataaggacttctatatcattgaattggaattacccaagagtgagaagtggtggtgatctagaacaagaatcaaaagtctaaggaatagcatttaaggcataaacgaaaagaggctaaaaaaggatgcatcaggagcccaggaatgacatataacgaacccaggggggaaaaaagatttttaaagaaggggctgccaaacaatatcaaatgcaggaaaaaaaaaaaaaagtcaagaaatggcttgtgaactgaactatgaatttagaattggaattttttacttcaaaagaagaaattgttaggaactacagagccaagagcaagatttctggttaaggagcaagtgggaggtgacaaaatgatgataggaatattctttcaaaaagattgacttaaaaaaagggtgagggcattacctgagagttagagaagcatacagacaaaattgccacgaaaacccttccaccacacgttcagagtactacaaatgtcctctaaacgtttacacatggtgcttacatcatagtcccttgagtctccaagaatattgacttaattagtaggtaatggtctttcttttcctgccttatccaaatgaggggaggagagagaaaatatgacacattctgttaaaaatagctctggagttattcatttaagagatactgaatatatattaatacattcattcaacaaatatttattggatacccaccatgtgcttactctgtacttggcactataccggattttagggacatagaaaagaaaaagcatacagcagtataaggtgatatttctaacctattatataaataaaccctgctttattaataatgcaacatctcaacatggtacacccactcaaatggatagagggcacatcattttgaagtatagtttttttatcatttctttcacaattaccatttgatcaaaattcttaaaccctttcaaatatttttatcattgaacttccactaatgaaaacctccaaaaattagtttatttttaaggagaaaaaaggaaatgaacctcatgtatgaaacacaaaaattctatgccctatgactatacagatcaagcattataaaggacaacaaactcaaaaaggactttatttacaccagaactcaaaatgattccttattctaaggctgacagtattatatagttcctttttttttttccagaggaaatcatttttaaaaaataatccagtatcacacactaaagtatctaaggttcaaagggcacgatacctggaactgactttcaaatgatttaggaaaaaataataaacacgtgtgtgtgtgtgtgtgtgtgtgtgtgtgtagagagagagaatgaaacgtaaagcaaatgtgaacaataagtgaatctgaatgaagagttctttctactatcctggaaacttttctgtaaatttaaaattatataaaaataaatttttccccaaattttattcagcattaggtaaagtatgagaataaatatataaatctatttaacctttcacgacgtttagaaatcccgtctttgagttgttattgtatctttctacacactgaaacaagccaatctaaatagcaatataaatttctcaaagtcatttatttcataccagtgtacttttaggttgccagataaaacacaggactcccagttaaatttgaattttaagtaagagacaatttctggtataagtatgtcccaaatattgcatgcaacatacttatagtaaaaaaattattcaatttgatatgatgagtactgggtgttatactatatgttgacaaattgaattcaaataaaaaaatgtaaaaaaaaacaaaaaaaaatattcattcaaatttaaatttaactgggcattatgtatttttatttactaaatctggcaaccataaatgtattgaaaactttcagattgataattatggattattcatgagcctccttagcattttcctattaaacgctcaatacactaaccatagatttatttatattacatcttctcacaagaaattcttgagagaattacatttacttagttttaacatatatgaatttgataatcctgattttattcaatattaaattttaaaatttatatcacatcatcaaaacattacttttactcacaataatattatacatagacttaacacaattaaaaaaaattgtttacttaaaacaatataattcttttataaaagaagctttatataaaatgtttggcttaagaatgtcattgctcttatgcctttgaatgaaattccactctttggccttcatagtccagaaacaggcatatttcaacttgttttccgttttcttcaatgaatattttgtaacaaattcctgaagttttctaattctttcacacttgtggaaattctgtaaccaaaaaaaaaatttctctcagaagatattttagataccttttgttattcaacactacgtttttagagcacagaaaattttcatgtaatttatttcaataaatttaaagatgcataaaccatttagtcaattttgatgtacttgagttcttaatttgacattgtaaaaccaagataatactgccctgaaattagttatttttaagtattcaaaacttagtattaaagctttaaaatacaggggtgcctggatggctcaatcagtttggcatctgcctttggctctggtcatgatcccagagtaccagggtcaagctccaagtagagtcaggctccctgctcagaggggagtcagcttttttctcaacctctgctcctcccccctgctcatgctctccccctcactctttcaaataaataaatctctttttaaaaaaattctaaaatgcagaattagaaattacataaatatatataaatctattcaatacttagtatatatactttagtatatataaatactcaatttatatatactaaatatatataaatctacttcaatacttaattaaaatacttaggtcatttttttttctttctttaagtaggctccacacccactgtggagtccaacacagggcttaaaatcatgaacctaggatcaagatctgagctgaaatcaagagtcaaacacttaaatgactgagctacccaggtgcctcaaaataataggtatttaaaggtttcacaattatagtcacatgcttaaagtacacaaatataaactacataggcattaaaatatgtactttaaatatgcataagttgaagcaccttggtggctcaggcagataagcatatgattcttgattttggttcaggtcatgagctgtgagtagggctcccacttagcaagagtctgcctgagactctttctccctctccttttgcccctccccctgctcatgcaggctctcactctaaaatacataaataaccaaaatctttaagtatgtataagtatacaaatattgaaaactaatcaatattccacatttagtaaatacacaaaaaataaaagcttttggactataaagagtaaaaatagtaaatgtgtgaccaaattatttttattactttttataaaaagtttgtcattattttaagtgtattttagttctactctccaccatgaaaaagtagcagaattctcaatcaactttatctgtcaagtttctgtgtgccagagaataattttaaaggtcaattattttacacccaaaatattatatcataatttttttaaagcaaagaaatgtagtccttagaaaatgttactttgtataaatctctgcattatttacatggtaggcaagaaagaaatatatctacacttaaattctgtaatgtaagttccttatttcaagtttatcttccaatcatttttatgaaaaaaaattagattttttaaagattttatttacttatttgagagagggggagggagggagagagagagcaagcatgcgtgcacacaagcaggggaaagggcagagggagaagtgggccctcccagccccggtggcgcggtggtttagcgccgcctgcagcccagggtgtgatcctggagacccgggatcgagtcccacatcaggctccctgcgtggtgcctgcttctccctctgcctgtgtctctgcctctctctctagctgtgtctctatgaataaataaataaaatctttaaaaaaaaaaaaaagaaattcagaagaagtgggccctccctccctcgctgagcaggaagccccatgaggggctagatcccaagaacctgggatcatgacctgagccaaaggcagacatctaaacaactgagccacccaggcacctcaaaaattcattatttttaaagtattattaactttttttatataacggtgaatttgcaaaggaattttatatgtatgcttatattaaacaacatgatttttccaggaccttcaaaaaatatgtgggcagcacaaaaaactacttttaaataattagaaaaaaatatacaaattcagcaagatgaatattgaagtccaatcagtaattagtcataattataaaaatcaatagatgaaagaataatacctaatgattgtgggtgtatacatacttaaagtatttcataaaatcacagaattctgtagtgagataatttcactaaataggatattccttacccagttttatctgagaatatatgacttgcattagacttacttggctaacaaaaacaatttcagtacattcaaactaaccttccaaatgcattaaataatgatactatttcttgtcgggttagatggaattcatagctgggcccactctctggcatatttgctatcagtttctcagaaaacaaaatcttcagagcagtacccaaaccctgaatctgtaacagaaataagaaaaaaaagaaaagtaagaaaattctttgcgcagagaataaatgaaaaattagaccaaactagatttgcttacctgaagctttccccatagtcgacatttaaaacaaccaacacaatccatgattctagaaatatttctaaaatgcagtcgaaagtcctcctaaaaacaatttaatgagatttttattaagatgtaccatatagtcaaacactaaatatttactgagcgtcttctatgtgcctagcactgtgcaagggatcttagagcgtatggaaaaaaaggaagagaattaaagtccacattcattgagcacttcctgcataccagaatctacatatacaatttcatttcatcttcaccacaaatccaaaagtagatgttattataatgaattaaaaacacaaggttcagagaggttaggttgcctaaattcccatatgtagtaaacagcaaacttagaccctggacctgcctgactcaaaaactgaactatctgcaaatatacacaaaagtaactgagctgaggtgttctgttttatgtgatcattaactacatgtgaatatcagaggaagggggtctggggtaggagagcatcatttaccaaaaaagaagaaaaaagaaaagagagaaagagggagagaagaggggagaaatttcaaaataggccttcataagagtaaagtcttgctttctggtattaattaggtaaaacaattagatatcttatggttattaatattctattataatattttcatttttaaatatatgcataattaatgttaccacatacatatatgcagaatatactgaacatccatgtacacttcaccaatctttagaaagaaagcattacaagtaccatggaagccctctatgtctctctccaaagtcctatatcctaccctctataattattctgaagttggtatttattgttctttttatacttttaatacatacgtatatatctatgaacactaaggtactgtgttgtttataattggacaaaatgaatccagctcatccaaaagtagtatatgtcctaaaggacaagtaaaagagaaagaagtcaagaacacatccttcttttactccaatggaaattattaattgatcctttaagttattccctctgtcctggacttatattggaatcccaagcttacagtatagtattctaagcaggaaatttgacattcaatcaggcattcatttgagagagagcatgcaagcaggggcaggaagagagcagaagggggaggagcagaagggaaggggagagaatatcaaacagactctgcactgacagtgaagccccatgcaggctccatcccatgaccctgaagtcatgacctgagccaaaaccgtaacagtcaaaagtcggacatctgactgaaccacccaggtggcccctgacatacacttctgaatgaaaatccattatactaatcagcctacaatttgagcaacatgtagcatttctctctctctttctctctctctctctctctctctctttctctttctctaatgtgataaaccacatactgggctcaatcataagagaacaggaccaaagatctaaaaaaaaaaaaaatgggaataaaccagcaaagattggtacccactattcaaagtagacctcaattccttttgggtattgttcttcccagatgctttattcagcttaagactctgaaacaggtgtattatataaaagattttaaataggatccccccaaaaataaattaattaaataataggatcccagattttgtatctttaatataaattttgtattaatttaatataaagcccaaattattaatattaattattatatgttaacaatacatcttgtgtttctgtatcttttggactgagttcagtaagaggtaatttgaattttaaaccaagttttaaaaaatatttatccagtaatattactctaagcaaattttggtgatttaaggattcttttaaacttgtatttcaagggatgcctgggtggctcagcggttgagcatctgcctttggctcagggcatggtccaagtctggggatcgagtcctgcatcaggctccctgcaaggagcctgcttctccctctgtctatatctctgtctgcctttctgtgtctcttatgaataaataaatatttttaaaaattaaaaattaaaaaaataaacttgtgtttcgacctggaattaaattttaaaaaaaggaaaaccacacttttaacaataacagcctagtaaaatcactctaaagtagatgttcccatcctatgaggtgctgacctttggaatatttaatagttattattaagtgcctaaaaaatccatatgtagacaagcattacatacagacagaataaataagtcacatgtatgcactataaatttccaaatgaatataaatgttatgatcaataaaacacatcttttacttaaaaagaattactaaatgcatagtggccttttggcaattatattttcacaatcaatagatactaaaaatactgtatcataggaagaggccttgaaagtttttgacttttagactctcattcatgtaaaagttggagacctctgttttaaaagattgtgcttgcttttgcagacattgtctaaattcagtatctggatctgtttgttaattcaaatccttgaatgtggcaagtcttgagtaaatctttgtctggcaatcacagagagtaagcatggttgcttatgatagccaaaataacactgcaaaatttaaaccaagtacttgtgtgtaggttaatttaatatttgagaccccaaaaataagctagtaatctactagatcagaacaggagaaaatatttatgacctccatagataatcaatgtccaataaccaaaatatatccctaaattatcctagattagaaaaatatatgaaccctaaagtaacctgaacctaagtcactttataaattctccttgttttatgtatgcagctttttttttaattttatttatttatttatttatgatagtcatacagagagagagagagagagagagagagagagaggcagaggcacaggcagagggaaaagcaggctccatgcaccgggagcgcgatgtgggattcgataccgggtctccaggatcgcgccctgggccaaaggcaggcaccaaaccgctgtgccacccagggatcccctgtatgcagccattaagtcaacacttaaagttacagtcagtgggtagaatgatcaaacatgctgtggttatatactgtaagttacattcagtgacaccaattgacaattctcacccattacttgtatgttttagaagccttcaagtgaggtcctactctatcttgaacactaaatagttctttcatactgtctatttctaaccgtacattgatactatataaagcaggcaaaacaagatcttttcagatacatctgaaactagtttaacaatctatgttaattataaaaaaataaaactcggagagcctggctggctcagtctgaaaagcgtgtgactcttgatctcagggttatgagtttgagccccacattgagtatagtgattacttaaataaaaataaaatttgtaaaagtttaaaaataaataaaactaaaagccataatgttcaccataaactacctttttttaaagaaagtaaatctctgatattaacaagttttcttgtttttttttttactttattataaaagaattcagaaaaattatctgttaaactccataggacatcaaagctgagtgtttcagagttttgataaaattaaaacattacgggaaatatttctaatctgcacgatataaaaagttttaatgccaaaacactttccaataatccagcaagtgtactaaaaataatgaaaagagtgaaaatagtagaaaaaaacaagtcttattacagtatcttccccctcacttccaagttcctggaagctgcctggaaggttatataagcactgaagtatgtatttctagcaaaaatgcttacagtaggagggaaatgggagattaaaaataactattatttaacagcaaaaaaaaaaaaatgaaaatgagtccaagaaacattgtttacaaactgcataaaatcaggttctttccttatagaaagaaactaagaatataaaacaggaatattgtgataaatattctgaagaaatcagatcaaacccagtgctcctgagagctccctgcctttacttacctatagctttgtaacagaatagtaataaaattttgagtccccaaataaactagaaatctactgagggtagtctcatcctttaatgacaagaattctgttttgctcatattgagtatttaaagagtctttctattattatatttgtaggattttgatgcaaatatacacaaagatggtcttgtatgagcttatacctctactaagagacaagataaataccaatccccattttgtagggcatcgtgtgttttcttttgctggcttcccatcccactgaataagatgaatgacaaacactgtaccctctccctctaaagaggatcctttaatttatccaaaaccattttcagaattctcctcaacaaaagacaaatactgccattcatgctctagatccatttcctttcatttataacacctattttttatgagaccatcaatgtgaaagccatctgttaggtgtgcagtgacagagttcagtcattactttgagcacaacataaactagatcttaagttggcctgcttttgggcttccttttttggaggaaaagaaagattatgactctggcttttaatttcctaatatataataagatttattgttaaccataaaaacatgggtttatattcatacctgcaaaagagtttgaatctaaaacttaagtaaaagtatgaaatatttaccttcagtttgtttgcttcctttttatccccagcaaaaaaggaattctcatcaaaatgcaaaggaaatgacctacatgttaaaacagagaagattcattttcaggtattataaaatattagaagtcccgctaagataacattttgctggttggtgatgaataatataatagaaagagtggaaaatatagtaaaatcaacactctgttgccccaaaacaaagtcttatccttaaatctaaaacaactgcataaaatagtagaagcttggccccaaatccaatgtattcaaccatgtatgaaaataatgcaggtaccaagtactactagaatgactcttaagactaaaaacttgtgccatttagtactgaagtctaaacaaaaacaaaactcaattctaaaagacctacaagcaaaattagcttttaactatttattttttaataattttcttttctcggggcacctgggtgattcagtcagttcagtgcttgtcttcagttcaggtcatgatctctgggtcccaggattgagccctgcattggctccctgctcagtggggaatctgcttctccctctccctctgtcttttcccccactcgtgctctctctctcgctctataaataaataaaatctaaaaaaaaaaaaatgttttttcctttctctaaattgaacatttaagaattgaactttggataccacttgtcactcttctattaatgtctaagttgtataagttgtaatatgtaatttacttgatttcatgaagtatttccagaagtagcattttgttttctgcgtcgtgaactttatttccagtgaagagttgaaaatctgggcgttcgaagaatggtaccactttagataaagcccttaattctattaagtagagaaagtacaagttcttgagccgtcttggaccttctccctcagtcaaaatgccatcaaatcgctgctgaaattctgtaatgttgtgtccccatttcttttccaaccaagtttctaagaagtaagaagaattatatattaaaatctgaattttaaagtttcagtttacttacattgggttatttatgcctacagaagttagttttatcttctagaacccacccttagaaggaaaataaattcactattttactgagatttatgatttcacaaaaatcaaatttctgaatataaacatctttataaaaccaagatacacaatttaaaaatgactgtctgaattactgataagtttgaagttagtgtgttttgttcctgaggcatagagatattttaaattccagaagaaataggttactgatgaaaattaaccatggtcttgttttgcaacagcatttttaaagcattaagagcagcagaaagtgcttttacccattaaactccaggcctgaagctggcacacaaataaaagggttttaatacagtagtacctgatgaataacaaactgtactattaggagctattttaactccaacaaaacaagaggatatttccaaaatgatgtgcacaattttgagcagcttaaaagaaggtaaacagagttaagatcatgctgaatgtgtccttataaaatctatagttcccacattcctgattactactatttaagaatgaatttttactacctaatattcaagagagtcaaccttatcccactaaggtaaatgccaaaaaattttaagaatttctgaaaataagtatggtgaaataaataaaagtaaatgtcacataccttgtagaagataccgcgcactcaaatgcacattaatgcttgcatgcaggccagatataagtctgtagaatgctcttttttctacacacaggcctaaaaaaaagcaatttggtaatagaaattttatatgtgaaacttgtaccattacacaattaatttcataggttttatagatgagaaaaatttttaacatttaaatttgtttaaaagcttccaaaaaaaaagcttccaattaccttctagccaactgtaaaaggtgttctctgaaattaaaagaaacataagtcacaaagttgtaaaaatgccaaaatgtaagtttttcaatatataatacccaatttgtgccaaacagcgatttaacaattaatgaaaggtccaaattttatctgcaatttatccaaaggaaagagattttcttggtgtagattcaattaagtaccattctcttgctcagtctctagaaagtttcagcactgcctttggtagcttcagtctcataactttctagataaaatgtttcatatgaggtcagaacacagaatttaaataataaatcaatgcaaggaaaactacttagccttgaaaattaaggacttagctatgaaaattaaggactcattattatgcttttctaacttgtgaaagtaaataaaaattataaaatagagttgatggtatattatttgcacatagctcatactatttcatgccattcaatatttcaaaggagcaataccaaggaaatgttacaaaactaaataccacttatattctatgacccaaaaagatcacttttcatatgtttagacctgataactctgcttttagaattatgttctaaagaaataattcaaatggtgaaggagtcaataatgtgtacaatgatgattatattatatataattattaagacctgaaataataaaaatgtacaataaatgtctaagttaacacaataggatactatataactaggtaacatggtagaataatataaaactatttaaaataaaaaatgtggaacatgacaatacatgaaaatgtttatttgagataacgtataaaaaggcatagaaatagttttcatacctaggtaaaaattctatgtatgcatttacaagagacgaaaaattatacagttcttttgactaaagttgcttataataatattaacaattaattaaacaagcataaaagtaataaaaggaatggcaaagagaatacacagtaaatcagactatctaaaaacttaaaacacctgtcagaaaacctcacgagtgaaagtaaaaggtaaacaaccaagtaggttgaatgtacgtcacaaaaacaacaaagggataacattctttttctttaaaagattttgtttatttgagggagagggaggggcaggaggagaaacagagtccccactgagcacagagcctaagggctcaatcccaggaccctgagatcctgacctaagccaaagacagctgcttaaccaatggagccagccaggagccccaaagggataatattctaaatatataaaaagctcataaactgaaaaagtgctaaagtacccatttaaaatggacaaataatatagaaatagagaattcaaaggaaaaactacaaatggtaagaacataaaaatcactgtttcactagtaataaaaaatccaaattacaacaatagagataccacttttaaaagtaaagataaaaatatgacaatacttaatgctgacaagggtcaggtaaaactattggtcaggcacactgactggaagggatgtaaattagcacatgctttcaatgacaaaatgcaatctggtatatgtatcaggaacctaaaatgtctgtaaccttggatccagcaaatccatttctagaaatcgaggctattatggataaaattcatatgttgaagctctatctccccaagaaatagtatttggaggtgagacccttgagatatgattaggtttagatgaggtcatgagggtaggggtgtcatgatgggattagtgtcctttataggcagaagaagaaaccacagctcgttctcagccgctgaggacacagtgaaaaagctggctacctgcaagccaggaagagagcccttatgaagaatcaaatctgctggcaaccctgatctcagacttcccagcctctagaactgtgagaaaataaacatcttattcaagtcacccagtctatggtattttgttagagcagcctgagctaagacataggctaaggaagcaagcagacatgggaataataatacacaaagatataaatatatccagtataaaaatatacgtaaataaataattatcaaaatgtcaacagagaagcagtctgagtaaccaagagcacggattttttttttttttaagagttttagattttgtttattcaagacagagagaaagagagaacatgagtggaaggagaggggcaaagggagagggaaagcaaaaagcaggctccttgttcagtggggagcctgatgtgaggctcaattccagacctcgggctcatgacctgaacagaaaatagacgtttaaccgactgagccacccaggtatcccaagagcatggaccttggagccaaactgactaatttcaattgcagctgtgctacttacaagtcatacatgatttagctgagttgctaaaccctctggcactcactttcttgtctataaaatggagataaatgtaatacctcctaagaatgtcggaagaattaaatgaaaccctatttgtaaactgcttaaaaaagtactggcatgtagtcttagccattgccattatcaattattttggggttgtgggattacaaatgatttctttccttataaaaaccttcagagttgggtggtgcagtcaactaagtgttcaacacttggtttcagctcaggtctgatctcagggtcatgagattgagcacagattcaggctacacattcagtgcagagtctgctcttttaagaatctttctccctctctctctgcccctgcctgctacacatacaaactctctctctctcgcttcctctctctctcaaataaataaatcttcaaaggtgtttggtttttttttttttttcaagtttaggaccatgaattacagggaatgggagtataatactacttgggacctagctttccaatgaaattttcagttctgtctgtttctgaagtagctatgctcaacttgacatggctatgatccaattagataatcacctaatatgacagctgtcagggataactcttaaattttactcaaatgaaaacctataaatatactcataaacaagatagtttctctaaggatagcctctagaagttaacaatctcttctctgagacaggatgtttttaaatagtattaaaaaactgaaataacagcctctaacataactaggaatacccaaggtagaataaaatctctcaaaaactgaaaattatagggaggagggggaaaaaataaaacccctgaaaattataggatcactactaacagtaatatgaggtatctttggaagaacaatgttttttttattaagattttatttatttattcatgagagacacacagacagaggcagacacataggcagagggagaagcaggctccccacagggaacctactgcaggactcgatcccaggaccccaggattatgacctgagccaaaggcagatgctcaaggtaagccatccaggtgccactggaagaacaatcttatgctaaagaatttctcttccaaatagtacagttcttttttttttaatttttatttatttatgatagtcacagagagagaaagagagagaggcagagaataggcagagggagaagcaggctccatgcaccgggagcccgacgtgggactcgatcccgggtctccaggatcgcgccctgggccaaaggcaggcgccaaaccgctgcgccacccagggatcccccaaatagtatagttctgattcagatacagttctgatttatttagctgttattgttattataatataaagtacaataaaaaagagagcaatattataagacattggtattctattacttaggcagaatacaaaagcaatttgtaaaactaatgttcagaaaaccgaattctgaaggagaggaaattgatacttcacattttagcaatttcatctagctggactaaagctaagtactgctttgtcttttcatatgcttaaacacgtggccttaagaataagaaaaatcaggcagccccagtggcccagggttttgcgccaccttcagcccagggcatgatcctggagacccgggattgcgtcccacatcaggctccctgcatggagcctgcttctccctctgcctgtatctctgcccctctctctctctctctctctctctctgtcaatgaataaataaataaatcttaaaaaaaaataagaaaaatcatttcaatctcattcacaaggcaaaaagattctcacaaagacagagtaaacctaaaatatgttaaacattttagcatcacaactaaaagagttggcaataactacccctaagagctagcataagccttggaagccagtagagcaacactgaccatgcctagaaacttcctatagggacccaacagatcccagaggtctgtctggcagtaaaggagagtgagttttccctgacagaagctggagggaaatgcctagctttggcgagcagtgggtaaaatgcaagagtaaattatcggaggctgaggcaggttgtcactactgcctgagcccaggcagagtcattttcccttaacctatgctttcaactcctgaattttcaataaatatgagctctcagaagcagaagaaaagtctgccaaatacaattctgaatgtatcagcaaattcatatatataatataaagaaattatatttaccttcacttttccctgaaaaacaaaacaaaatatttattattataatgtccttccagatgtcactttaaaatgctataattgcataaaaataagattttgactaactggttagttttaatcactcagttcactcacataagcaaaatctgagagagttactcatgacacaactctatctagtggcagtaggaattatgcctgattcgcttcaagggcatcatctccaagagcgtggataaggagtggtttcagcttgtacaagatttaatatgggctgacaggggagaaaaatctaatctatcatctgagaatactctcaagtatcttaaggacttacagttatttggctggcagagcctttttccacatttatttaccctaaatttataacaccgtttctgctaaagatttgtgttcttgctttgaaaactccagacggacactgtaaaattttacttgattcaggaattttacctgattcaggaatatttttagagactatttgttaagattcaaattatgcacagttcagcaattagtaagcagctgctcatttactattaaaaaactgtcttcattttgcccacacttatttaatgccatcattgtttattaaaataacatatgctcattgcaaatacacattttgaaaaaaaagaggacacagacaaaattaaaaatgtcatccataactccctctgcccaaataataaataccatttacattttgataaatgtcctttttctttgcatatagatatttagatattatattatgtatgtttttacaaaaatatattgtacatactgtttgagacctgtttcccttcttcaatgtgctattggtcattcctgacctaaatgaataagttttcagcagtatttctgatggctgtattctattacatgaatacaccaaaaatcatttcaccagttccttaatgataaacatttaaattattcccatttatctttatgataagtgagagtggttaattaatcagatcaaaatgtgcatccatacagaggatcacccctctgtttggaactgacattcatctgatattaaatcaatagcttccaatgagttaccatatgtgactcatataaacccaagtccttgtttaaagttgttcttttatttctaatctaagaaagacttgtctgccaacattaagggaatgatgcaatctcaatgctttccaggaggaaatttatgtttattgactatatgagatcagcagcttttcaaataaattttaaaagtgaaaaacttacacatttcctaaaagcacatcaaagatttcatcattaagcacatattatgggaacagggatgtatatttcctaagcaaaaagtttgaaatcatatactgaaatgctgagttccaatttcacatctcctctgcaactacacagtgcctagcacatagtaaatggaaggtaatcatctattgaaggaacaagtgatctttacaattgtaggcaagaccattaaatgaggagagcagttttcatcaatctttcatttaacaaactactccatctgttatgtgtcaggctctctattaagaaatgaaacaaacactctccatatgcccaaactaatagggtagatcaatatatcatagtaaaataacaccagacaatggaaaggtagtaagagaaataaaatatgacataagatcattttataagaagagaggggttacttccagttaggagagtcagggaaggtgaaaaaggcagcatttggggcaatacctcaagtgtgaggagaaaatgaaaaatgttaataaaacataaagacgggaatttgaagtcagactctcaatatgtataatcatcttaggatctgatttgaggcaaaagtttttttggatattcatttagctacaaaatgattaaaaatagtaaaaaaataaacacagatattatgtaaaaatgctcagaagaataaatatttaccaaatctccacttatgacaacctaataccatgaacttcattacacaaatactccttactgacgtataaatattttaaacaccaagttctctgtaagggtgaggcataacttctatggaaacaggaatatgtgatctcaactgctcttgccaacccttatatggccttcctccttcttctaaccaaagttcactgactgataaataatataacagtgcaaataaataactcaccttgaccagaagccaaaggatttaaaggtcttttaattgtctgtggcctagaaacaaaagaattgtaaaatataattacattacctatcatgttacaattatctaagtaaaagcgaaattatctcagagagttgcttaatgactacatccaaaatcaaactgttttattgagctataaaatatttagttttctctaattgctttaagggatggtggtcattagttattttagcaattgtttctgcttttttcccatttagcaccagaaagtcatttcctaaacacttcttcaaacaaaggaagaaaataccaggtaagctcttctagagtcactaatgtttttacatatattacatacatatatgtgtgcctacacaagtgtatacatatatgtttgtgtgtggcacaaagtacattcctgactgaaagacaaacaaaaaatataaatactgaactcaagcattaaaatataaaggggaaaaaacactgtgggtagattattttccacttagttaatcttaggtacatcaaatagccctgcagccaccaagtttgttatgatttcaataaaaggtatttttatcatacaaaaaaaaagttaaaatgtcattaaagtgcttttaaatctcagaatgaatattcattagtatcattagtaaagtggagggattgctttatctgcaatttaaattttacaaactcgcacaaattgagacattttgagaagagaatatgtaagctatattttaacattctcaatttagtgcgtgtattgtttatattttagaaatatttatactgggaatcatgttataaattagttaagaaataaccacaatacaaatataaaatctaacaaatgcttcctaactctattttagttaaaaaaaaaaaaaaaaaaaaaaaaaaaaaaaaaaaaaaccctttgggggcatctggctggctcagtcagtaaagcatgcaactctagatctcagggctgcaagttagagccccaagttgggtgtagagattaattaaaaataaaatctaaaacaaaacaaaacctttaaagtgagccaattaaatcaaacattcctaataataaacaagggaatttaaatgaaacacatggcaaaattagtaaatactggaaattctccacttcaaaactgaagaaattctttaagttataaaaagaaacagactgacattttattggtattctgctaatctcttatatttgacttatacaaagtgaaatgtattattaccatatctaggaattccaaagattttcccagaattcccccatctctgagatagtataaagcaaacacacacacaaattctttccaaaaatcaataagcgcattgtttagaggtcactggcttacaagtgggtaaacttgaagcatgtcccagaggcatagtgattaaaatgactatttcctttgtagtggttaagagtacaaagtgggttcttccacttactagattttgagacttgaaaaatcatttaccttttccaagtctcagtttccccatccgtaaacagtgtgactacaacacagggctattgcagggattaaaagagaaaatgtacatatatgcttagcactagtctggcacactgtgaatgttcaagtgttacctattataattattctctgaaattaatttaacttgagtttgaaagcagataaaataattatagccacaaaaagatgaatacaaagcaccaaaaagaattaggatgaccttgggaaatgaagtaaacctggctggctcttggttacttcatctataaaatgagattctataatccactgaaggaacatttgtgaaatgtccaacaatactcctgtaatagtcttatactattctgtcttttaaagaagaaaaaaaatatttgttgaaacacacgtccacatgtttctccagaggagaactggattaatgaataagtatgtttccatgtccaaatacatcttttaacaatgtgaatgtgatttgcagtttaaagtcattataatttgtttatttgtttataaagaaaaatcactatatccatcaggattttctaaatgaaaatgacacatacttaaaacagttttcttcatagatgacattccaaatcttccaagcatctggtcccttgtaacctgtgtagcgctcaggattaaggagtaaatctacatattcagcatcaggagactgtatgtctataaaataaaatgtttcattaaatattttctgcaattaccttgaaaaactagtataataaactaaattccacgatcctaaggcaccataaatgtcacagtgtatccaaattttaaaaataaccttttggggtgtcaggggtagctcagttggttggatagctgcctttagctcaggtcatgatcctgcagtcctgggatagagccccacatggggctccttgctcagtggggagcctgcttctccctttcctccctcctatctgctgtgcagtctccctctctttctctttctcttgctctcaaataaaatcttaaaaaaaaaaaaaaaaaccttttacaagaaagaaaagaggaaaacacaaacagtcacattaatgtactcactggttacaaagcatcctgcctttaaaaatggtaaaaaaaaaataggaatacatgaattttagaattgaaaaaacatggtaattaaattttcataagctatccagatgaaaaatatactctatatctccctccacattaaccacaagcggctcatcaataactaaggtaaatgaagatgtgttactaccaaatactattatcaaaaacttccttcttacatgaccaccatgaagatccactacaaagctgtcccaaaagtataatcctagacatgcaaaaagttataagcaggatgatccttacatcagcattatttattaaagagaaaatcagaagcaacccaaccatccaatagagcagaacacaggctctggagccaaagtgcctggttacaatccaagccctactactcattcagtgtcgaacccaaggcaaattatatatgttctttatgcattggtgctgtcatttataaaatggagataatactcggtgttactgtgagacttaagtttatacgtgcaaagtacttagaacaatgctaagagtatgatacatattagctagtgatattgtgatatatcttaacacaccatgttacaatcaacaaaactgctaagtacaaaggctatctaataaaatgaaaaataagcattacagaagtcaattacagatagaaatgaaaaacaacaaaaattggtgagatattagtttctcatatgttctataaatttgtgtaatgtattgtaactttgaaacaaaaaaaatggcccctcattccccaggggctttgggaaattattcaatatacagtaatactataaattatttaatgagtaattactcatgtataaagcctaacaacatgaacaaaaaaatgaaaaagtgggcaaaaatggcctcaaagcaaccaaagtagatgacaaaaatctgagcacacaggtgcttataagaaggcccatcaagctctcaacagtacctacttcttattaaaaacacaataaaaaaatataaacaagcttggttatttttatcccaattgacagtacattagagactttttaggaatttttgcttctaaaagtagcacagtgacagcatctagaaataactgagagtccatgcagaagcggcaattaaaataattagaaaaagtagaaataaaaacttagaaaagggacacatagcgggttcagtcagtagaacatgtgactcccaatcttggggttgttagtttaagccccacgttgggtgtagagattatttaaagaaaaaaaaaaaaattaaaacaaatttacctggaatcctctggttcaagaacagagatacttctgttcatctcaactaatactaaaagtattgccaaagtacagcaaattatgatacattcataaaaataatcctcattttaaaaacatgagtaatgctcagcatctagtacttttaagacagaaaactaccaagaaatgactaaagtttttatattatgtctaattagacataaatattagttgactcataattttacttataacaaatacttcatctcacctcaaatttttaataaaaaataattaatataaccatattttgccagatgacaaaagctcaaatttctaaattaaaatttataaaatatcttctgtcttctacctaccatttatacacattatatcttttttataaagctatcctttttttttcatcctcctgtagcagaagaaacaaatatgaatggataagtgattcatccaagataacagaattccatcagataacaattattgatgttcactccttgctacacaaacataagcagatagtttcaaaagcatactttgctaaatgaagttaaagcattactgttcttaacactacagaaaaacgcatgttttaaatttaatttcctttttttaattagaaaaattatttatttctgctcctttcatacatcttattgtgcagaaacagtctcacacatatctgaataatgtactgtcacactgtttaaaggcaaagcaccataggtaaagctgatcagagttctcagcttatgggatcttgcttcctgattttacattaatttttgaaagttagaaatgtcatctccacaaaatgttaagggggctgtaagaaataatcactttattcaatattatagttgtggaaatgggagtatactttctttaagaaatgaaaaactaagaagaaaattccactaaatatcattggtgtgtcagtacaggtcagcaggagaaatactgtgagaagtttgtctctgataccaagaagacattctagctcaagctttaatatgattcctatttctcacgagatgcttcttttctgctgcttcactctttttccatacttcacatcagaggattggttacagcctttaaaacttcattaacaggagcaaatccaatatccacggatttcttgtcaaaaggcattttttaacccatcaggtagcccagcagtttcattctcatgaatactctagccatgaaaaaactcaataggacacagacgaatccaattaatacaagaagaaatctattgagttttggaatgtttggtgcattcgattggtccaggattatgaaacctaaacctcccattgtaaacaggaagctggatgcaagtccttccataatatattgtccatttactctgtaggccaagaaagctactggtctctgatgtccatgttcatcagtcatagaacaaacacttggaggttcaacaataacatcataaattattcctccagtgatgaggaagtaagacaccactaccaaagtaagacaccaccaccgtcatggccgacggcatgtgtaccagggcagctccttcagcttcaggttggggcattcgagcactaagaacgggacgcggtacaaggtctccatgttgttggcagcaggggtttctctctccttaattttatttcaatagtaatgtttaggccaaagaatctttgtggacaagacagtaaggtttagaggttgggagatcattttatcctccctcctttcctagtctaaaccttagtgtaagtccacaactccttatccaacatccctggggtcaaatgtgttttggaattcagaacttttcagatttcagaaaagtactataatatatgcaacatgtactgaatattactccaagagagactggggcagcaactcttaattataataccaaaaatacttctgtagtgaaacatgtgcatactcatactaaatgagtctgtgctagacttgggaaaatattcattttcagattttagaattagaaataaaggattataaatattatttgccaaggcataatcatgttttacactaaggaaagcatgtttctttttttttttttttttttttttttcaaaatgaaaccacagagttaaaaataagtactttcccttagccttcctcttttcagggggaattgcaggatttgtctcttgcttgcaattaaaatgatctgtatcattctttttgctaatttttttttaaagatcattaatctgcttcaaaagagccactgaaggataccaaaactcaatttgatttgggtttgtttagccaattaaaaggctaacaattcaacttagaaaaaggaagaatgggagaatctataaatctgattaaagggttctaataggtcctttaatttggatatgtaacaatccaaggccagtacaacaaaagcaagcttttgcaatctaaatatctacatttgaactctttatgcaaaatgcctgtgtatattacaaaattttatatatgtatatatgtttatatatatatgtatgtttataaatatgtatatatgtatctatgtttacgtgtttatatatgtatatatgtgtgtgtatatatatgtatatgtatgtatatatatatatacacacactactaagatacacagggggtcaattttttccagaaactgagggtttggttttctttctttttttttttttttttaactgcggaaaaacgtatataacgtaaaacttactattttaaccaggtttaagaatacaattcagtgacattaattatattcaggacattgtgcaaccatcaccactaactgtttccaaacttttctatgttctcaaactgaaactctgtaaccattaaaaattaacaccccattctccccttctgctaacctctagttactctgtctctatcaccttgcctattccagatattttatataaatggaatcatacaatggttgtccttttgtgtctgatttctttttttaaagattgtatttatttattagagagagagagagagagagagaacctgcacaagctgaaaaagaggaagagggagaagcagatgcctgctaagcagggagcccaatgtggggcttgatccggggagacgctgggatcatgacctgagcagaaggcaaacatttaactaactgagctacccaggcaccccctggcttatttcatttagcatagtatttccaagatttatccatgttgcaggatatatcaaaactctgtttctttttatggctaaataatgttcccgtatatgtatttattatactctgtttatccattcatttgttgatggatatttgggtcatttctacctttcagctattgtgaatgatgccaccatgaatatggctatacaagtaagtatctgttcccccaccttcaatcttttttggcacatatttaggagttgaattgttaggtaacatggtaattttgtctttaacttttgaggatctttagaaatggagttccagaaactgttttaaaatattttttttcttagacccaattttaaaatgcccacaataaaaaatgttattaccatcagcttcacagaagttgtctgaggaatcatcatgcttggtccactgaagaacagccttctgtgtttcctcacttcaaataacgaaaaaaggtacccttttttaagtaaacatttcacaagaaaaaaaacaaatactactgcaaaaaaaaattaattaaccttagagattcatccacagctccaagtcgttcagcttgttcacattcttcaatgaggttattggctacctcagaatactaaaaggaaaggagaataagcagattacaatttagtgcatttttaagactttttaaaagaatttcagggtgttattctgtatgttggtaaattgaacaccaataaaaaattaatttattaaaaaaaaagaatttcaaaattattcaaagttcttttaaggggcacctgggtggctcagttggttaagcatctgcctttggctcaggtcgtgaccccagaattcctggataaagccccatactgggctccctgctcagcagggagtctgcttctcccactgcccctcaccctgctattgctctctctcactcactctctctgtctctcaaaaaaatgaataaaatcttcaaaaataaaaaagttcttttatatctatactatttccttagcttcaaaacttaaaaaaaaaaaaaaaatcaacatcactaaacatctcccctgaagctaaaacaaaacaaaacaaaacaaacataaaaggctttgcttttgttgttgaacacatttgccacatggtcacaaaataaagaatgtacttctgataactcattaccaagctgttcaccaagaaaatcaaaggtctaaggaatactaggcatcatgaggtaatgtcccacttttttttatttttccatgccagtgtggagcacaacatagggcttaaattcacaaccctgagatcatgacctgagctgagatcaagagtcagacgcttaactaactgagccaccaaggcaccccaatgttccacttttctaatggcctaattgtaagcatcagtcagtcttcccttccataagtaagtggttggaccagatgatgtgtgcccaggtctatctcaactctatatgccatgattctatatatgctctggaactcatcaagtcttataaaaaagtattccaatatctttaggtgtttaaaatatgttctttagcaatcacctttcttctcaatgtctaagacacacacacacacacacacacacacacacacactattctgctaggcatgtgtctggcacaggggaagtaaatgcagatcctaagatttcacaacacattagtcatcaccaccaaagggctaaaagataacatcagaagcagaaggcacagattcaatcactcaacaaatatttattgagtgctcttattgttctgatgaccacactaatgactgcccagcctatgacacttctgaggataaaagagaacactaaaactgagacaattttttgaaatgtttattgaataacaactttgtttcgttacattggttgacctataaggcagctcaatttgaacactattttcaaaaataaaattctttctacataattattaaggggtaaaggggatatgatatattcaatctactctcaaatggttctgaaaataatatatacatagatataggatgataacacaaatgaggcataatattaaaaactagtgaattgtacagtacacaagaggtgtttatactaatcttgcaacttttctataagctgttaattagctcaaaataaaaagttaaaatacacatcaaaaaatgaacaaaatttgggatccctgggtggcgcagaggtttagcgcctgcctttggcccagggcacgatcctgaagacccaggatcgaatcccaggtcaggctcccggtgcatggagcctgattctctctctgcctatgtctctgcctctctctctctctctctctgtgtgtgtgtgtgtgtgactatcataaaaaaaaaaaaaaaacaaaacaaaatttgctcaaaaagcaacatatctatattaaaaaaaattaaaatccttatcagaattatctaaatattaaaacagaagttgggacatctgagtggctcagtggttgagcatctgcctttgcctcagggtgtgatcccggggtcttgggattgagtcccacatcaggctccctgcatggagcctgcttctcctgctgcctatgtctctgcctctctctctctgtgtctctcatgaataaataaaatcttaaaaataaattaattaaataaaacaagttaaccatattttttttactattcttagtttttaacaatttaatcagttttgttaagtcacaaatgtcttgatttaaagatttttttttaatttattcattcatcagcgacacagaggcagagacgtaggcagaggaagaagcaggctccacccagggagcctgatgcaggactggatcccacggccccagaatcacaacctgacctgaaggctcaaccatttagccacccaggtgccccagaggtcttgattttaaatcattggcattttcctgagaaaaaaaaattttttctaatttatcatttttaattttttcataaaactgctcataatcttcaaagttaatttttatggctagtcaacttgaaatcattaccctagattaactcttctctgtagatacaatttttaattgagaaaaatattctctctacaggtataaatacgtgaaaatattttaaatcaagtattttcacaaggtctattcttttgccttcaaagtatgtttcttcactaaacattttaagacaaaactcatcaaataatgtttctcttttttgttattttaaatgttttgccaaatatagatgctacaaaattataagccttatttcattccatttcagatgagaatttaaatttatccaattaaaaacaagagtttcatcaagaagagactgggacgcctgggtggctcagtggttaagtgtctgcctttggctcagcgtgtgatgctggggtcctgggatggagccccacatcgggctccctgcatggagcctgcttttccctctgcctgtgtctctgtctcaaataaataaataaataaataaataaataaataaataaataaatatcttttaaaaaaaaaaaaaaaaagaagaagaaactcttcctacaagaggagatactccaaaaacaattataaaatcccacaattaaagcttaaatattatttgaactttccccacttaatgtattcaatccctccctagcttttgtaggaataaatttcgacatctttattttttttttaatttttatttatttatgatagttacagagagagagagaggcagacacacaggcagagagagggagaagcaggctccatacaccaggagcccgacgtgggactcgatcccaggtctccgggatcacgccctgggccaaaggcaggcgccaaaccgctgcgccacccagggatcccgacatctttgtttaaaagctttgttataataactgcaatttgctaacccttcaaaagctaagaacttttttctttaagcattccattcatcgatactttgaataatgactttccactgattttaaacatattgcaattgacatttcgagatctcacatattaaaaattggttaataccactgaaggactcttgggttgtttccaaaggctcaaatatttataaaatctgattgatgatgcacagctaagaaagtctatgcttcctgtctataccaaagtaatatttattccaggattagtttcacctcaaaaattttatggtcattaagtgtctatctaaatataaaaacctgtatattttgacaattatcactttttttaaagattttatttattcatgacagagagagagaaagagagagaaagagagaggcagagacacaggcagagggagaagcagactccatgcagggagcctgacgtgggactagatcccaggtctccgatcacacctcagactgaaggcggcactaaaccgctaggccatcggggctgccccaacaattaccacttctttttaagatgtatgtatttatttatttatttgagagagagcacaagcaggggagcagcagagggagaaggagaagcagctcccattgattagggagcctgatgtgggactcgatcccagaatcgaatgggatgacacaagccaaaggcagacacccaaccaactgagccacccaggagccccaccacttctatcttatttggtaaaatatcacagcatgtttggacacaattatgaattatatcttttttttttaagattttatttttagatgatctctacaccaatgtggggcttgaacacacaatcccgagattaagagtcacatgctctactatctgaaccagccaggtgcccttgaattatgtatatattagccaactacaaattcatttctgctccacagatttcttggtttaatcagaattgtttttaccaaaatttgtatattatcaccacaaaacaaatattttgtcttcaattttgagctttaaatgaatttataattgcatcgacaatggggacaaatgttttccctcaatagaatgaaattccaaaagttttgagtccatcaaattaattttaaaaatctaacaaattttggaattaaatgactttctacttaaaacagccaataatggcatcactgaactatgtgcaaagttctgccactgaagccaatacattaatagctatgacttcattctttgtatgcaaacaagaaaacatggaatcaaaatgagcaaattattttagacctatagtggaaaaagtgaatagtggttgccccaaggggaaaaagaaattgattgggatagggtatcaagtgactttccagggtaatggtaatgttctctctattgtaacagaagtatagattacacagggatatacatttagcaaatgcacacttaagatttgtgcatcttgggacgcctgggtggctcagcggttgagcatctgcctgtggctcagggcatgatagcggggtcctgggatcaagccctgcatcgggctccctgcatggagcctgcttctccttctgcctttatctctgcctctctctctctctctgtctctcatgaataaataactacaatcttaaaaaaaaaaaaaaaaaaaaaaagattttgtgcatctcattgtatgttaattttataaaaatacattataagtaatactggactctacttaatgatatacttctagttgtgtgtgtatgtttgtgtgtgtgtgtatatatatatatatatatatatatacacacacacacagttgatgacacatttagggcaatgtgtactgatgcttgcaatttactttgaagtacatccagaaaataatctttttaccgtataactagaaagatggacagatacatatatgataatgtaagtttacaaaaatgttaacagtagaatccacctgatggttatgcatgttcacaggaaaagtccttcaactttgctgtatatatgaaaatcttcatagtaacaccagaaaattttaattcagaagagtttagtctaaatgaaaaaatcacatatgccagaatgatatgtaagtacaccactgcagctatacatgtttagttttttcaaaaaaaagattttatttatttatttatttgagaggaagagagaaagagagagagtccaccaaagggagtagggagtgagggagagagagagcctcagattccctgctgagcgtagagcccgaggtgctggatcttaccaccttgggatcatgacaaagccaaaaccaagagctagatgcttaaccaattgtgccacccaagtgccccaagttatcattctttgacagttttcttaaccactaatttatgaaatagatgcttagactttatcagtagatttgcgtgttctggtgttcatacagtcagagatagttctatggcccttgtggatggtaaatgatgaccttttgtgaaggttacatatcaccaataactgtttgtcatcagatttctaaatgtaatactttttcattaagcatatatttcgcttttttcttagttatcttggccaataggattcactgtaaaaatatttttaattactggcttgcctgggtggctcagtgggttaaacatctaccttcagctcaggtcatgatcccagggtcctgggattgagcccatcgggttccccactcagcgggaagcctgcttctccttctccctccgcctgccgctgcccctgcttatgctctctctttctttctctgtgtcaaatatataaataaaatatttttaaaaaacgttttaagttactaaatagtaaaatagtttgttgatttatgctatacaaaaaagtataaaaccaaaataggttttatatgcaggatcgctaaccatttatttcccatatatatttttttcataaacctgacccataatttgccaagtttaacattgaccagtcaaatggcagcctggaagcttaggacattcacaggtatgacataggccacagcacagttggctgctaactctaaaagaccagcagggaagaatgtccaatgatgttccccctacttcccaagactgtaaggagtcagcaatccccagatattgtgtctgccggcaattattttatcagcaagtattttattgcccattatattttctttgagaaatcatttatttagaaaaggtcagaaaaagaagtgtaagttattattggtcatcttagtgttaagaactcgttagtgtacatatgtcttaaatagaggagacaataagaggaagctagaaatacaaagtatttggtcaatcaaatccatcttaacttactttaatgcaactattaatattttatttaaaaaatttaaaactcaggacaaatgataaatcattcaggatgccagaaaaacaggcataaaccagttctgcctcaggtaagccttggcatatggtctctttatgtactcttgttactctctaaatgttttggattttactccaagagagatggaactcataagaagattttcaacaaaagaaagatacaatctgatttcttaaaaaaaaaaaaaaaaaaaaaaaaaaaaaatcactctggctgctgtctttagaagagacaatagggatgcctggatggctcagtggttgagcctttggctcaggtcatgatccaggggtcctgggattgagttccacatcaggctccctgcatggagcctgcttctccctctgcctgcctctctctctgtgtgtctctcatgaatagataaatcttaaaaaaaaaaaaaaaaagaatgagagagagaaaatagagaggcaagggcagaagtaggcagcccatttaagaggctaccacaataatccaggcaaaactgattatggctttaaagattaagattctgggtatattttaaaactctgtaatcacaaatcgaatttggcctaccaaaaaaggccttgaaacaattaacaatcccctaacaattagcatcccctaaagcccagattataatctcgaaacaacatttcatgctaaaagaagtaggacttcttagaaaaaaaggttattttcaagaaattagaaagaaaggtacaaaattagcctagaagatctttttataagaaaccaaaaagtctactaagactactgggatctgggcagccctggaggctcagtggtttagtgccaccttcagcccagggcgtgatactggagacccagaatcaagtcccacgtccggctccctgcatggagcctgcttctccctctgcctgtgcctgtgcccctctctttgtctctctctctctctctctctctctcatgattaaataaataaattcttaaaaagaaaaaaagattactgggatcatctcaaaaggccacagtcactaacttaaaggagctcctaatgtatacaatggaatattactcagccattagaacaacaaatacccaccatttgcttcgacatggatggaactggagggttattacgctgagtgaaataagtcaattggaaaaggacaaacattatatggtctcattcatttggggaatataaaaattagtgaaagggaataaagggaaaggagagaaaatgagtgaaaatatcagtgagggtgacaaaacatgagagacacctaactttgggaaacgaacaaggggtagtggaaagggaggtgggcaggggtttggggtgactgggttatgggcactgaggggggcatttggcaggatgagcactgggtgttatgctaaatgttggcaaactgaactccaataattaaataattaattaattaattaattttaaaactttaaaaatttaaaaacatttttaaaaaagaaggagctcctagtggccaaaggcagaacaactcaagcatcaaaaggaattaaaaaatgactacaatagagtctcacattaaaaaagtcaaaactcataaattcataataacatttaaaaatgaaaactcttggggatccctgggtggctgagcgggttggcacctgcctttggcccagggcgcgatcctggagtcccgggatcgagtcccatgtcgggctccctgcatggagcctgcttctccctctgcctgtgtctctgcctctctctctaggtctatcatgaataaataaataaaatctttaaaaaataaaataaaataaaaataaataaaaactcttgactaaagaggacacttgatgggataagcactgggtgttacactatatgttggcaaactgaatttaaattaaaaaattaaaaaagaaaaagattttaaaaataaaaaaaaataaaaactttgaggcatctgccttcaactcaggtcatgattccagggtcatgggatccaggcccatatcaggctccctgcttagtgaggagtctgcttctccctctacctctctctctgctcatgctggctctctttcattcaatcaatcaataaatataaccgaaaccttattgggcatctttggaggtgccaggactccaaactcataattaatctgaaaactagtaaacaaaggaaaagaatgaagcatttatcttgtccatcctgtataaactgtatttcagggcatccagatagttgacaagaaaaggtctttagagaaatacaacagataataagtatagaaagaatgatataattagaatataagcattttcaaaactgaaagaatgcaataggtaatgatcatcaaagctgctaaaactttcagggaaaaaacgagtagggaactgtataatgaacctaatgaccaatcttaatttcatgaaaaaaaaagaaagccagacattatgtgtcttttgatatgatgtaagagtaagtatacagcaacactaatcaatatatatcagaaaatgaatctgaaaagctataatatataaccaccagtttacagaatacaatgtgttgaatgatgatgtgacagggatacaatcagtggaaagttctctaggataaggactcatttccttcaacagataagtttgcaaagaaagaaaaaagaagagggaatggacataggttaaagacttaagtggagcctaggtggctcagccggttaaggttaagcatctgccttcagctcaggtaatgatcctagggtcctaggattgatccccgcatcatgctccctgctccaggcgggagtctccttctcctctctcctgcttatactctatctctgtctctctctcaaatgaataaataaatataaattaattaattaactaattaattaattcttttttaaaagggacacctgggtggcttagcggttgagcacctgcctttggtccagggaatgatcctggattcccaggattgagtcccgcatcaggctccctgcaaggagcctgcttctccctctgcttgtgtctcttcctctctctctgtctctcatgaataaataaattaaatcttaaaaaaaaaagagacagacagacagaaatacacaagcagtgccagaaaataaggaaaggaggggagtggagtcatacctggcaagggaaatgaaatttatgaatttttttgttaagataatagacacattagtaagtatgtgtatataccttgtagcttgcagatttaattccatcaggaacttcatcctaaaaaagaaaaaaatgtttttatcagacatttattctatgttctgaaaaaaacttttaagtgtctatgatttatgagattatttttatttttttaagtttattttatttatttaagtaatctctatacccagtgtggtgctctaactcatgaccccaagattaagagtcacatgctcttccaaactgagccagcccggcgcccctatgagattacttttaaactgaaatagtcagtttttatactatttcttaaaagtaaacaaaaacccaacaaattattctctaggttgctgttcatatattttaatacctcataatagcacagaaatgtaaaaatagttactccctttgatgttcaaattgtcccacactggccactaggggacccataaagtgctgacttgttatctgcacctgtctcctattgatatgacctcagtaatctttagcagcattttccattttcttttatgacaagatactccaggctcaccgtgtatatttcttgttccagtcctggaattgactgttttttaaggagccctagttcttttcagaggaaaatggtactggttttagtcatgtgttggccactaaccaactataggacctatctgtatatcctcaaagtgatgctgtgaatagacacaatgatgtatgtactctataaattgcaggaccctattccagtgctaagtctatttctgaaatagataatacctgcccaaagggaatgatccacacagagataaacactttattgtgtaactttccagaattctttttctaagaccagatatttagagggtttctaattttttcatatcatgccaaatttataaactaatttcagcagaatcgacacctttacaatatttattaccgctttacagtcatctttgaacatctgtccaattattttagtaagtgaaaatcctggtggactagtggatgggatttaggaggacacatgacaagatgagcatagggtattatatgctgacaaactgaatttaaataaaaattttgtttaaatcctggtggaattactagaccaaaaaatgtggaccttttaaattttgttgatacagggcagccccggtggcgcagcggtttagtgctgcctgcagcccaggacgtgatcctggagaccctggatcgagtcccacgtcaggctctttgtatgatgcctgcttctccctctgcctgtgtctctgcctctctctctctgtgtctatcatggataaataaatacaatcttaagaaaaaaaaaaaaaaaggaactgcttaaattttgttgatacatatgctgaactgatctccaaaaggatttaaccaccagagtattcatttcttattcacaaacagtggatattgttatttgttttcacattggtcaattaataatagaggggaaagaacattgtttcgacccatcataaaggtaataaataattggcctttcagtttatagagagtccaggctgcgagttaaagccccacgttgggcgtgtagagactacttaaaaattaaatgtttagggatgcctgagtttattagttaagcatctgactcttcatctcagctgaggtcttaaatttcagggtcatgagctcaagcccccaaaaatagaaatattttttaaaaatttcttaaaataatgatgaaattcaaatttttaataattgtaaaaacacttgcttagttctgaccaatattaataatggcccatttaatgtataagtgcaattaaatgcctttattatctaccatatttttagcatgcttaataagtcataaataagttattggtaaacttgaatttccctaactactatatactactaaatataaatgctagaacttaggaaataaaatgaaacatttaaaatgatgatatcattttaatgatattatcataacaggttgtttcacaagttaattcttgaattttcaaaaagctttgtctatgaggatacgtttaactaaaggcttgattttcatttaactaatgataaaatatccacaaatactattttacgttagcattaattccatatgctagataggtctatatagcaatatttacacatatcaaaagaaaccactcaaaattatagcaccacttcatacccattgggatggctaattatccagaaaacagaaaagagtgaatgttaatgaggatatagagaaattggaaacctcgtgcattgctggtgggaatataaaatggtgcaggtgctgtgaagacagtatgatttcctcaaaaaattaaacacagaacaaccatataatccagtaattctaattctgggtgtatacccaaaagaactgaaattaggaacactaaaagatacttgtgcacccgtatccagagcagcattatacacaatggccaaaagatgggaataacccaaaagccaatccataggagaaggaataaatgaaatgcagatacacataaaatgcagcattattcagccttaaaaaggaatataattcaaacacatgctactatggataaaccatgaaaatgctgttaaggtaaacaagccagacacaaaaggacaaatgttgtaataatcctccttatatgagctacctagaataatcaaattcatagagaaagaaaatagaatagtggttgccaagggcaagagggatgggtgaatggggagttactgtttaacgaacatgcagtttcagtttgtgatcaggaaaaaaattctgcaacaggatggtgctgatggttgcacaacaatgtgactatacttaatgccaacaaactgtacacttaaaaatggttaaaatggtaaatcttattatatgtattttatcacaataagaaagtaaaatacaaatatatgcttttaaacggaaaaaaaaggcttcattaaaagtgtaaaattcagttttcagagtaaaatgcttcaaattttaatgtctgaggattcttaagtaaaaccaggtgtttaggagcacctaggtggcttagatgattaagcgtctaccttcaactcaggtcacgatcctgggatcctagtatagagccccacatcaggcttcctgctcagcggggagtatgcttctccctttttctctgcctctcattcatgctctctctcttgctctctatctcaaataaataaataaaataaaataaaacaacaacaacaacaaaaaaaaaaaaaaaaaaaacagggcagcccggtgtctcagcggtttagcaccgccttcggcccagggtatgatcctggagacccgagatcgagtcccacatcaggctccctgcatggagccagcttctccctctgcctgtgtctctgcctgtctctctctgtgtgtgtctctctcatgaataaataaataaaatcttaaaaaaaaaaaaaaaaaaaaaaaaaacaggtgtttagtccaaccccttcccacccaaggaaaacaatatacctgtggataaaggagagattttgcttacacttccattaatttcatttcgttctactataaacacaactttgagtaagaaataggaagaaaaacatcaagccaaaagaactgttaatctcacaagtaaatcaaggattgtatttatcacaaaatttaaattcttttattatgaaggcagaataattcaaaacaggttttacgttagtaagtttaggttttgtttttgttttgtttgtttgtttgttttttaaagatttgagagagagtaggggaagggaaaaggagagaaagaatctctagcagactccctaatgagtgtggagcccgactcagggctcaatccaaggaccacaagattgtgacctgagccaaatcaagagctggatgcttaaccaactgaaccacccaggcaccccaagtttaggcttttaatctgtaaatattaaacaacattatatttaacctaaggactgaaatgttattttagttgtgttgcccctttttaaaaagtgcaattatttgaaaaaagatgtaacagatcttaaatgtatacgtggttcttaccgattgacaaggcttgacagcacagtctcttcgcccacactggctaatatcattccagaaaggacatggtctcttcaggtttacctataggataatagaaaaggttataaaagtaagaatcttgagattattattgacatgtgttcaattacaatgttataacctggtcatgctattagttgcagtttttctttttcttccatttcccagctgccaagttccagtgattgtatctatgtgtaccttatataagtaaattggtagacttggttagaaagacacagactgggatgccagagtggctcagcggttgagcgtctgccttcgacccagggagtgatcctggggtcctgggatcaagtcccacatccggctccctgcatgaagcctgcttctctctctgcctgtgtctctgtctctctttctttctgtgtctctcatgaataaataaaatcttaaaaaaaaaaaagacacagactgctactaaacagactccaaacagagggcaactaggagacaaagtagctgatatcaccactgctgaaatgatattcatttttagcaagtagcagacaattgtgaacttagatgataattacatattccagtaattagatttttctaaactccttctgtagttatctcaagataaaatatcacaagtgaccagttaaaataatacaggtcagaataaagtcatgcttttcaaaaaacttaattatttaacaggagtcaatctaatattttagagaagtatgaactagcaattttgataacaatataataacttctgttctgacttcaatttaaacaagtttccaacgccacagtgcaaaactgacttgttgaaactgaaagtatccaatggatggtttcagacttatattcttcactcttgtaaactgaattttaaataatggccacaattttgaagctcaacaattcctaagaaaatgtaattatccatttaaactttaagtattcttgtgcaaaaaaatttaaaataaaaataccttgtaatatctgaagtagtcactttcaagaagtttttgtagtcttgggaaaagcctgtagttattaaatctatcgatggtttcaacatcacaggtacaatcatccaagtaaccactaacctgttacaaagaaaatgaaataacacatcaaaatatcttaggtacaacagggttctttttccttacaaggttatgactcaaccaactcttatcctctctcctctcctaatttttggaaatggggggatccctgggtggctcagtggtttagcacctcccttcagcccagggcatgatcctggggtcctgggatcgagtcccacgtcaggctccctgcatggagcctgcttctctctctctctctctctctccccctgtctcatgaataaataaataaaatcttttaaaaattaaaaattaaaaaaataattttcggagatggggtattacagtaatctaataatgctattgctcttactatatacctggaggaatgcagtggctgctttttgtagggtgtactaagctcatcatcacacatgtgcccacacatatatgtagtgagttgataccctgcagccactctgtaactccccccaggcctgactaggtgtaggcatctaatacaaaccaggtcatggtccctgctccaggaatctggaattgagaagaagaagagatggctcttcctaaacaactaaacacagaccatatgctagcatgtgaactgaggaacacatgagccagtcagcaagattttaagatacacagtgaagcagagacaggagatggattcggttttcccgctcctacttctccccatcttccttgaagccccagttgcattcccattcttggctctcctaagactccatattcctacaattcaattgtcagtcttcccttttagtatcctacaagatgtatagtctggagacaagtttagtgaaggtacaaaaaaaaatacggtatttataagagaaacaataataactataacaatctaactactcccaaatattagaccatgataatttgtctaggttagaattggtgcttagaaatcacttatcagggatccctggatggcgcagcggtttggcgcctgcctttggcccagggcgcgatcctggagaccgggatcgaatcccacatcgggctctcggtgcatggagcctgcttctccctctgcctatgtctctgcctctctctctctgtgactatcataaataaataaaaattaaaaaaaaaaagaaagaaatcacttatcattagcagcacagatagcaaattgaccacaaaaccaattctgatcttcaaatgcttaaaaataattacaatcagacaatgttatcagaagtgaaactaaaagtctcagatgtttatttggggctaggcaaatacctacaaaattaattatatattgctaacatggtaatgctgcaagtaacaaatatgtcaagatttaagaatggtaactagatttttaaaaaaaatatgtatatagggcatgctatagaaaagaggtccttatactttggtctgaatatttgcaatataaactactttggattacattttagggagacttgtcaaaaaattttttttcaaatctactggtaagtaagcaagtaatacttcattaaaataccatatgtaggtgatttccctctggaataccttcagtaccttttaattttgaaatattacaaaacagtaatgtaaatttttcacctaagagtgaatacttttggatgatgagagataatactttggatgatgacagcaatatctaacagctaagattctgtaccgatttgcctagtcttacttgttttggactaattcaggttccagaaatctgatctacatattttgttactgtaataactactttcattccatatgcaaatttttccttatttcctgctaaaaattctctgagtatacaataatctttagttcctaatttgaggtactaacaaaacaaaagtgcttctaaagaacctagatgatttgattttttttcacacccctttttttcaagcattaaaaacagaacttctaaggatgtaaactagctactgttttttcccttggatacaaatcattatacaaagaaataagagacacaaagaatgccaaggccaaagggatacatgccaaatagagacattaggtcataaggagaaacaagcacacaaaaaaaacaagagaaaggatttgaagcaattattttttcccccttacgtatttcattttaaggtaaaaaaaattctatctttaaaattcgagttcgggagcagcctgggtggctcagcggtttagtgtcgccttcagcccagggcgtgatcctggagacccaggatggagtcccacgtcgggctccctgcatggagcctgcttctccctctgcctgtgtctctgtctctgtctctgtctctctctctctctcactctttctctatctctcatgaataaatacaaaaaatctttttaaaaaattcaaaattaaaataaaataaaattcaagttcaggcatcacctcttttggaaagctatcccctggagtaccactcaactcctgctggcttaactgtcgctcctatgtgctcccatgacactccacataactcttagatacaaattacctcactatattggatttatctatttcaattcctccctctagagtttaaaatccttgagagcaaaatcatgttcattcattttgtattcttagtccttagcactgtacttctagacagtacatagtagatgctcagtatttatttgtagaacggatatatgaacaaatgtttcgatgaatgctgtccacggtcacgctcattcactggagaccagcatcacagtctaattatgactatgaactaccatgtcacctatggtgcttggtgctcagtgctccagaccacacgagcccaagtggcagaaatgcactcagaacaaggaaagcaaacagcagaggtaaataacccattgtgtccaattttttaccaatctatacaccttaactacaaaggaagctagaggaggctccagaccataaaggaatgcaagatgcattcaaagcagaaatagctgatagcccagagacctcaaagagagaacacaggacaaccataggcttaaaaatcctcagacctttaccttagaaattgagtaggaggtacttccaccaacaacaaaatgtagcagggcagttaagtaggtagagcagggatagaggagtttcaatagatgcagagggcccagcaaaggagagacatgaatacacttagaaacccaagacatgtgactgttcagataagcttgccaacctaatccctgaagagaagtctagcaggtacagatgccagacctagttctagaaattagagaaccagcatgttaccagaacagagtctctggagaaggcaaaaagaagaaatccagttaacaggcccagagcaaaatcttggaaacaaagcaaagcctagtctctaagaccaaacaatgggtactgatctggaacaagaatgactggatactactgcagctttgggatgtgctaaggctgcttaaatcattgccacattatctcctaaactgaaacagaattctgaccctcccataggaataccaattctatttaatgcgccccccccccccccccagccccaccacacacatacacaaagtgcttgatgcatgctaaaacttgaagctcgctgctccaggcaacaatcagccaaactaatttggtaggaggccaaactaataggtggcaaacagaaggcccttgctgagggatggtagatagaaggaccagggaaggcctgacagacatctcccagtttaaagtccaagtctctaaagagctgaaaagcctctgaaggccttctactgcagcctcccaagcacacagcaatgccctcctatgcactctcaagaaggatgcagtgtgtaacggtggttagcatgcaggccctggggtaaggccttcttggggttgaatcccatcgcttctacttattagttattggtcttacccaagtattttttagcccctctaagcctcagtttcctatctgaacacaaaatggtaatactaatagttcccatctttaagagttgatatcaaaatgaattggcacagaataaatggccagtaaatgttaatcagtatcattaacgtaccactacttaaatgtttctagtgaaaggaatcttactagtcccaaagcaacccacaacattttatttgagagagagagcgcgcgcgagagagagagtaaatcactctctcaagtaggggggtggagaggcagagggagagagaatcttaagcaggctctacacctgactcaaggctcaatctcacaaccctgagatcatgatatgagctgaaatccagtcagatgcttaacgaactgagccacccaggtgcccctatgttttgttttgtttacaaagggaaaaaaaaggcccagtttgcaactaaaatttttcaaaaattttacatctgtagcctcagtggaacatagaactggagagccaacagtcagatgcagaagtagtctcaaacactttctccacggactctgactggtttggactaattaccaaaatataaaaggcaagaaaagaaaataacataggcctgcttgtttactattttctggttacaggtactctttaatttacaatgaaagacaaaaaaaacaaaacaaaacaaaacaaaaaaccaaaaaaaaaaacccactttctagttttcttacatgccaaaaacttccagtcctaccagactatcattttttctcaaagcactgtgagaatatattcctcctacctgaaatatcttttaaaagtgctcaaactgttcctttttttgcaaagacctttagttatgtttaattttatagtggtttgtgactgtgaaaaagaacatgaaaagtactcattgaaagagctgactgagacctctgttaatgagagcatggaaacactgaagattctatactgggtagttggcaccactctaagtgacatggagagctacaagctatttctgctttaaacctttagtctttagaactttaaattattgttgtgacccaaagtgtagtaaccaatgtaaaatatgctttgttctacactctttgttcaaaagggcctggaatgtattaagtgctcagagtcaatggacatctctccagtataacctgtttcaaagattcctctgactaaattttaatccaggcttagttccacctaccacgcaacatattatcaagtgtttcttcttccatggtctggctactctgactaacaaataaaaactattttttaaattgacttacacaagacattagacaagtaaatctgctaaaaatcatgtatgcagagtgtatctacaatgcactacaaaagaaaattgattttgaaatagccattttggattatctgagttacttccctttcattagcctgatagaaatttacaccactcagatcttgatttgagttgatctgagtgttattagcactagccatattaagattaataaaacattttgatgacatgggagtttatagacatttctaattaatttaagtgaaaaacatgtccattctgcctccatatctgggcttcaatatttcttctgaggttatttctttaaaatgcatcttgggattccatgaacagggattaaagttctgttacattcatcctaatggtacataatgggtaaaaggaaatacaaaactctgtcaaaagcaaaacaaaacaaaaaaaaccaaataaaaaagggaaaccaagaaagtctgaagagtctccatttatttcaagcccatacctattacaacaaatattacaattattattttggtttaaagacagggtgggtcatgatcatggggttctttataaaaattacatagacttgcacaccccaaaaggtaaaaaagaccaattttctgtgcaaaaaaaaaaaattttagggacgctgggtggctcagtggttgagcctctgcctttggctcagggcatgatcccagggtccagggatcaagtcccgcatcaggctccccgtgggagcctgtttctgcctctgtgtgtcactcatgaataaataaaatctaaaaaaaaaaattattttaaaaagaatgatgattttaaaaaagtggggagggcagcccaggtggctcagcggtttagcaccgccttcagcccagggcgtgatcctggagacccagaatcaagtcccacgtcaggctccctgcatggagcttgcttctaactctgcctgcttctccctctatgtctctgcgcccccccccccactctgtctcatgaataaataaataaaatcttaaaaaaaaaaaaaaagtggggaactatatataaggaagagttataagtccccggcaatttatcacttatttgcagcaactaacactgaagcattgttatcaaaataacttacaacatacagtgaaaatggttttggtaggatttgatgtcaagaggcatatgcagtaatggactaaccttaaagattcatttggagccatcaacccatctgaaagatcaattccagaaaaacatgcaaatggctaagcagaatgattgaaagaatatactccaggtagcacacatcctgaattgtaatttctgggatgcctcggtggctcagtggttgggcgtctgcctttggcctagggcgtgatcctggagccccgggattgtgtcctacattgggctacctgcaaggagcctgcttctccctctgcctgtgtctctgcctctctctgtttctcttatgaataaatttaaaaatcttaaaaaaaaaaaaaaagaaatcctgtattataatttccctaacacttcttgagtaccaattatgtaccaggctcagtactctgtagtatcaagaaatgggactaaatttttagtttattttttgatctctcaaaacttattcacaataggccacaataaatgattattgaatttaatctattcaaagtaaagctttgtatcttttacttcaataattttctaaggccaaataggtgcacatgctgctttggctcaatttagagttgatagtctgttaacagaaaccctactaccgggcacccatgaaagagtgtgatgaggggtgttgatgtggtaattcaaggcaggagtggtaagagagattggcaacaggaagggagaaagacaattaacaaaacggtctccacagaactttcctgctacttgggtactgcaaagagaatgagagattttaatttgtatttctaaactctaggtcaaaagttagtcttttgactaactattgtctagcaatatttatgaactttttttttaagattctattttttaagtaatctctatacccaacttggggctcaaacttactaccctgagatcaaaagtggcatgctcaaccacctgaaccagccaggtgcccctactagttttttaaaatgcttaggatctcaagctccaaagaacattattcactaaattgttaagttcttaaggacagggatcataccataattatttctgtatcacaaatattcaggtcaatgtacacagtgcttataaatgtttactgagggcagtcctggtggctcagcggtttaacgccgccttcagcctagggcctgatcctggagacccaggatcgagtcccacatggggctccccgcatggagcctgcttctccttctgcctgtgtctctcatgaataaataaataaaatcttttttaaaataaataaataaatatttactgaatgagtaatttccaccattcatctcccctagtcttttcttccatctttttttatttctgtgtctctcatttctgtatacatctatgtctatatgcttgtccaattttctcttcatatctattcatcacttgtcctttctcctccttacccccatctcttccattattgaccgtaagagaactaaaacgtatttttatttcaatctattgaattgagattgatggtctctgttcttaagttgatttaaatagaccatttaaaattttttcttgggacacctgggtggctcagcggttgagcatctgcctttgtctcaggatgttatactgcggtcctgggatcgagtcccacctcaggctccctgcatggagcctgcttctccctctgcctatgtctctgcctctctatgtctctcacaaataaataaataaaatcttttaaaaaaattttttcttacaacttttaacatgcaaccctcagtaattttttaacgttgattccaaaaagaaaaacagccagtcctgttctaaaagcaaaagaaagggacctaacagatttttgtgttggggaaatattcgaatcttgaaaacattttaaggggtgggaagtgggaggcttaaatactaatcagaagaaaaaatttaaaaaaatttaaaactccccaattttaatcaaatatctaaaaaagttatagggggaataaaagttgaaaagctcaacaggtactattatttcattatttaaaaatccaaaatacagttgaaaatgttatattggacatcttcttccaacactaacttattttagtcttttacttcaacttttcttatgtgcaaatgtttgtactttgtgttatgttgtattcttccttataagtacttgatggcgtgcagttgcaatccctgaaggtaaaggagcttttcaatcttagtcgtaaagcagcaatttcctttcaactctcctactcgtagctagataacatctcaactctcaaatcactcagcaaagcaacaaaacgcaagaataccaagcagtgaaagagatagttcttcccctcataatattggtttatttcttcctcccataatatttaaagctgtttcttgactctgaaatagtagcattgcccctacacataaaatgttatttctgatcattaattgtaaaatccacttaacaggaaaaaacttggatgcctaccctcaaatttgtataaaatgtaatttttttatcaacagaggccaaccaaaacgtgactttaatgatattaaaatacaggacactgcatatccgaaaacctctaaatttctttgaattttttttttctcaaggaacctacctctctaactaaaaagggaaaaaaaatagatcataataagcttgtacttaaacttgtgcactgaataaggctcatcctcccaattcagaccagccaaacgggtgtcacgttaagggaatctcatcacattttgggaaaaaaaaggacacagggcgaggagccagggggcaagcggcggccctcaagacacagggcagctgggcttgcacacagaagagccacacgaagcccttctcctgcctgacaacgagatccgagatccgagatcctgcgccctgcacaccacaccgagcaccgttccgggtcaaactggaagtcgggaagatccaggttctgctaaaacggccagtattaagtgcgcgtgcacagtgtgcgcgcccttcccgggcagggaagacccacgaagatgcataacccaagtcggcaaagacctagcggcgcgcagccaccccggcccacaccaagccccgcgagctacggggcacggcgccggggggcgcccgggagggcggagtcgcgggggctctcccggtgtcacctgccggggcgcggcccccagcgcagggcggaggcgggcagccccgggagccgccgcgccgcgcggccgcgcacagccctcacctggcagaagcaccgctgcgccgccgtctcggggggccgctgctcgccgtgactcgggccgagcagccacacggcgcccacgaggccgaccaggaagccccagcgccggcccatagccgctccggccctccgcacctccgggcccggcactcgggcgcaggccgcgcgtccgcagaagaagcccgcgcgggccggcccccggcggcgccccacccccggctcctcccgggcccgccctcggctcgcccgcccgcccgcggccgccgcctcccggcagagcctgcggacgtgcctcggcgcccgcgccgccagcccgccagccccgggcctcggggcggcttcctttccccgcgtgaggctgacgcacgagcccgcttcccggcgcggctccgccccgccccgcccggcccggcccggcccggcccggcccgggagcctcgcccggctgcggccgccccggccccgcgcgcgcaccggggtccttcccgctgcgagggcgagggcgagggcgagggcgagggcgagggcgagggcgagggcgagggcgaagcgggaggggtccgagcgtccccgcaggccccgggccccgccccccccgcccacccccacgaggcgaaccgcacgaattgcgcgtccacagcgcccctggatgccttaaagctgaaagggacacaaggctgcatgggtaaatcagagtttccaggagttacgtcgaaagggcaaagagaagcaggtgaagttacttactttcaatatatataatatatatattaaagattattatatatgacatattatgtattttatatattatacatttaatatatattatatataatgtattgtatatttaaagattattatatttaatatatattttttaaatattttatttattcatgagagacacagagagaggcagagacacaggcagagggagaagcaggctccacgcagggagcccgacgtgggactccatcccaggtctccaggatcacgacctgggccgaaggcagcgctaaaccgctgagccaccagggctgccattaatatattttatttaacccactatgtgcaaaacatttcgaaatatactcaatatcagattattcataaaatattttacatattttttaaatctttgaaatctggtgtgcatcttatgcaaactagccgtattccatagtcaaatgtagcgagtggcagctgtgtccgtcagcgcaggtggaggccaccttctcatctcataggaggaaacaggcccagggtggaaagatgacttgagcaagggatgagctggtcctcttcttcccagccatgggtctagcctaaaagcttttattttttatttatttttttttttttaaggagaaattttcatagtgaaactggaaagattcccaacatcttatcttacacattaaaatatttcaaattatctttttgtttggtatgtcatattaaaaaaaaatcatttaacgaagtagctttaagatatggtaggccccaaataggtattacctctgttttccagctgggaaaaataagcatagcaagcttatatatgttactcataggaatatgttattcaaagttacatggtacactagaggtgaaacccaaactcagatatttctttttctaagattttatttttatttgacacagagcaagaacacaagcagggggtgtggcagggagagggagaagcaagttttccaagaagcagggagcctcataccaggtttgattccagaacccttggatcatgacctgagctgaagcagatacttaactgactgagccacccaggcagccccacaaactcagacatttcttaacttcaatgcccataacctatgctctgcccatcatttgccaagtggactgacacatagtaaaaagtcatcaaccatctgagattctggtgggcctgagaagcccaccagagtctaatatccacaatattcgacattttcttattaatccaatctcccctctttgcctaggaagttctttttcattatacctgtactgatcctatctgtctctccagggccagacccagctcattcattccctcttccacatggtcttctttgtttcttcttcacgcatttccagtctctaaatgaattttaattcaacaaacttaccctatgccagactgagcttgacattagagagatggaaggcccagtccctgcatgtggagggataaaagttttatgataacataatatgttatcataaaacatagtaattatgttctatttcctttccctctgcttctgttcaaacacagaatttagcatgtgatcctttatgatgtttctaccactgaattgtaatctctttaaactctttaagcagggattatgtctcaaacatactgtgactctcagtatcttaacaaagcttctctttgcatgtgtttgtacaatgaaggaatattttttcatatacaatattaatatctgaagattatactatcaaaaataaaagacaatatgaaaatggagaaactaaatgaataaagcctaaaattgcagaaggaagcaatgtgatcatgaatcggctctggatttcaccctgatgcaataagcctgtaatttgggagagtttaaaagtaagaatgttctcaggatgaaagctccattctgaagatttgaattcatgccagcaaacttgtaatcagaaacaatcaccatattaagacaatttaatttatactttattgctttttcagctttaagaaagtttaattgactaataaaattttaagatatttaaagtatatgtcatgatgatttaactagatcattgtcaaatgatcctcctgatgggttcattaacacatctatcatctcacctatttactctttcttcttccttggtgagaacatttaactctcttagtaaatttcaattatacaaacaatgttaccaactatagtcaccatattatacattagatcttcagagcttattcactttatgtttgaaactttgtacccttttgcctatgtgtccccatttgtccccccactaacccctgccaaccacttttctactctcttgtttctatgactttcactttgacttttttttttttaatttcacatgtaagtaataccatgcaatgtatttgtctttctctatctggcttatttcacttagcataatgccctccaggcctatccatgtggtagcaaacacatgtggcaggatttccttctttctcacagctgaataatagtccattgtatatatgtataccacatcccctttatccatttaaccagtgctgcacacttaggttgtttccatacttaggcaattgggaatatgatgtaatgaacatgggagtgcagataatctctttgagagaatagtttcatatacacttagaagtgggattgctacatcttactttattttcttgataattatgatttctcctttgggctttgtaagggactttagaatgtgtaaaatacagttttatacacgtggcataactaccagtgatatttatttccctgagaatccttcaagttggtcctttgtgtgagtttacttttcctcctctgcctgctttggcaattatctcacctgtgttagagcctatgaaataactggttagtcattcagtaactattaaggagcacccacagggcacatagttcaacctttgctttccagaagcacagcctcccacctattacaccttagctaaacagcattacattttttagagatgaacaaggtcacaaccttgttattctaatactagtgattataacaataacataaatttagtgtacacagcatttcctgatggaattctgattacctatgcaaacaacagctattattatttttttttaatgaccaaagcaggaaatagcttgagcccaatttctgaaaatgagacatggcgatttctataggaagcttctcagtacctaaacattttctggcagagaataggctggaaggaaataatttaaaaggaaaaaatttgctcaaggaaaaggaatatcatgacaagaggaagaaaggctaagtaaaaatctaaaggtttggtgttgatagttgattaaatactagtatccattgactataaatgtgcagataaaacattgctagacgtttctctcaagatgcttgagattatttgaattgggggagaaatgccacctcagctctatctttacctcttttccctcatattcctggaagaacaagctacatatagtagtaacagacttattaacttcccatttacacctaaccccactgtgcggtctggtttctaactctaccctcctattcctctaaacctgaccttcttatggtcaaatctaattaccattttcatgagataatgaaatctctgctgcattttgacaatgctgattccatcctccttcaatttcctatgcaccaaacacttcagattctccttccacttctcaaatattatataactgtcttctgtttcccctagcctacctctatgatgtgagtgttcccgcaggatactatctgctgtccagtgttcttttctatacttgcccctaaagaaacttgcccagtctcatgattttaaatacccctccctgctgatgattcccaaatctatttttccaattcagatctctccctcgaccttcaaattccaactgcctattggatacaaccagctgcttccctcagaactgtttggtcataccaccatccatatctagacacgtagaaagcaggaagccaccctcagtttctccttctttttcaccaaagattggttgatctattagtcagtcaagtcctgccacttctttcttcagtttagtccctcctctcctttatgattaaggacttagtttcagctcttattgtcactcacctgatttattgtcacattttcttaaatgatcacccactctcacctatcaaaacacagcctcaatgctagcctgatttctcaaaaatataagtctgacctacatcacaactctgtttataatctcccatgctcccaactctctgaggtatcaaattcaagattctcagcatggcatttaaggtccccatgatccggcctcacctatttttccagttatatctccaatatctctctgtctcgtagtaactgaactattaacaattccccatacagggggtaccttggtagctcagtcaattaagcctctgcccttggctcagatcatgatcccaaggtcctgagatagagccccacatggggctccctgcttctccctctccctctggctgctgctcttcctgcttgtgctctctctcttactctgtcaaataaataaataaaatatttaaaaacaaacaaaaaaacaattcctcatatagaccttgtttccaccctccgtgtctttactcattctgttttcactcctgaaatgttttctaccctgccccacatcaatcatcctcactttacctcgctaactactttaagattaagcttaggtgactgctacctgtatgaagtcttctctaactcctctgtggttggattaggtttctcctttttggttccgtaagctcatacaattgtgctcagtacatggaatcaagtatgcatttatgcagacattctccccattcaacagaagggtagagaactcaccttggtagtctcagcttccccagcacttagcatgtatgtgagtttcagaagacgacttctgaatgaattaatgaatgtatacataaattagtgaacttgaaaagataacagtataagatgtcacagggcaacatgtgattatgtttcaaacaaaaattttccaaaaaaaaaaaagaaaaaaatgaattaatgaatgtatacataaattagtgaacttgaaagataacagtataagatgtcacagggcaacatgtgattatgtttcaaacaaactttataaacttagaggcaaagcaatcattttggacataagtaaatttggattggacagaggacacagagaattagaactggcaagagaaaatttacaaaaggtagggatgtgggaaaatttttttttcttttttttttttggaaaattgatgacaaagtaggagctcaactaccaattgatggattaggaaaaaaataaaagaaacttatctaaaattaatttagggggcacctgggtggctcagtcagttaagcctctaccttcagctcaggtcattattccagggtgctaaaatggagcctgtgacaggctccctgctcagcagggagtctgcttctccctctgcccttccttcttgctcgtgatctctttgtctctcactctctcaagtaaataaaatcttaaataaaataaactaaaataaaatttatttagaacacatttcaagatcaagattgtccagtcaagaaacaagagtggctacaaactcagggactctagactctacatttacagagagaggggatagagttccaaaatgaaaaagggtggattttttttttttaagattttatttttatttatttgtgagagacacagaaacagagaggcagagggagaagcaggttctatgcagggagcctgacatgagactcgatccgggtctccaggatcacgccctgggctgaaggcggtgctaaaccactgagccacctaggctgcccccaaaaagggtggattaagtgaagcccctccctgctgaatgttaaaacatctcccttacctccagcagaccacctatagcactcagtccaaaaaatgcagacctaatacagacctggtttccattcactgcctcatgcctgatccccttctttcccattctaaaaggagagtgagaattcttccaagaataaacaacagcatcaaaaacaacagaacagggacatatgagtggctcagttggttgagtatctgcctttggcccaggtcatgattccagagtcctgtgatcaagcccagcatcagagtccctgctcagcagggagtctgcttctccctctccctctgctgctcatactgcttgtgctctgtgtcaaataaataaataaaatctttaaacacacacacacacacacacacacacacacacaaacccaaaacaacagaaccgttagtggcctccccccactcacacactcagaattctactgcctttttatttaatgtctcagtctatgatcagaataccaaggctcacaagattgttaaggaaagcttccaacacaaagtagatcaaaacaaataagaaaataggaactttgaggaaacaaagagggaagaaaggaagaaaaacaaaaagctataatcaatatcatcaaatacataaggagtctatcaaaagaacaagaaagagatctttgaaactaaatatatgattgccaaaataaaaaattttgactgaaacattagaggaaacattgaggaaatctcttagatagcaataaataaaaaaaaaaaacaaagaggtagaataaatgagaagagatggaaaaaatagagggctaattcaaggagaacggaatctgactaataagagtaccagtaagagagaacattggaaacagatgattattagaggtcattcaagaaaatagctaaaattgaaggatggctatccagattgatagggcacacagagttcccagtccactggatggagaatgcccctaacagagataaaatgtgcagaaagagaaacaaaactcctggtcccctacaaagaattaagaatcagaagagcactggaagctccaggacaatggagcaaggccctcaaaattctgagaattctttagccagccaatctattaagtccgagaatagaattaagatattgttatatatgaagaataatgtacagctttaaatcctttctcagaaactttatgggaggatatgatctaaccaaagaagtaaccgggaataaggagataagggtatcttgaaagaaaagatagcacccaagagaggagttagagaagttctaagaagatagccatgcaacaacagcccagagcccagattagagacagcagggcagcttcacaagaagtgtcactaggtgaactggagggatatctgatatgactgactttatggaaaacactattaggagcaagttaataactatattgtaaagttggggagaagccatcaaaacaaaacagcttttaaaaaatgaggcagcttttaattctaggaagttcaaacagtttttttttaataaatttttatttatttatgatagtcagagagagagagagagaggcagagacataggcagagggagaagcaggctccatgcactgggagcccgacgtgggatttgatcccaggtctccaggattgcgccctgggccaaaggcaggcgccaaaccgctgcgccacccagggatccctcaaacagttttatttttttatttttttttaatttttttttttatttatttatgataggcacacagtgagagagagagaggcagagacacaggcagagggagaagtaggctccatgcacctggagcccgatgtgggattcgatcccgggtctccaggatcgcgccctgggccaaaggcaggcgccaaaccgctgcgccacccagggatccctcaaacagttttataataaaacataatcattgtatattgcttgatttacatagctccacaataagacaaatattggatgttgaattaaccaaacttgtataaattatacgtatggaggacagaggtagggaaaggggggatctggagtgatataagggtgctaaatctttatcttccttattagcaagtccaaagacaaaacctaaaattaatctgtcaagaaatagcagcataagcatattatttagaaagaaaatacagaaaaacatgttgaagagttggggaatgccaccaaggggtagaataggatggggcagtggactcctctttttcaatctaagtgctgtagtactttaaagaaaaaaaatctttatgtattactttattaaagaagactatttcccagaagcataggaattctaacttctactcctacctcaacatcttaccacttagccagggatacattcaattacatgcactctggtaggcatttggggtagatatttgggatgaaaaacttccaaaatctcaaatgttccagctgatgtgcaagcaaaaatagttgctacttgcttatctagtaccatttcccaatttctctctggaaaaaaattggttcctattagttatctatcactgtgtaacagattgccacaaaacttaatagcttaatacagtgaataccgatcacttcacaattttcctcggaccagcaattcaggagcaggtaagctgggtgtatgactcaatctctcactgtgtcacaatcaagactagggattcagtcatctgaaggcttctttagcgctgaaggctctgcttccaagacacctcactcaagccgctgctggcagtaagcctcagtttctgaatacagtctcatgggtgcatattaaaaggaaatagggagtgcctgggtggttgagtaggttaagagtccaactcttggttttgggctcaggtcaggatctcatgggtcataatatcaagcccagtctcgggctgtgcattcagtgcgagtctgcttggaagttctttccctctgcaccttcccccacttgcccgcatgctctctctctcaaataaataaataaataaataaataaataaataaataaataaataaataaataaataaatcttaagagggggaaaaaaaagaaacagagctgttctggagaagccatgtgcaaaatagataggaggttcatctgaatttggatttttgccagatgggtgaaagaaaaagaacaagggtcaacagagttcaaaatattggtgtgttatgttgaaataacacaatagtaggtgctcataaatatttattgaattgaaccaaattgagctgtcttttttctctgtctcatcctctcttctctacttcttaatgtcagaggtgatatattttggtattgacagactagtttgaccagaatagttgcagctgagcagaagggactgtccctgctcaatccatcttccttgtttatcagctactgcaattttcaactatattaagaaaaacagaatgtaatagtcatgcaatacccatgttttcctaagaaatttaaaaacctttatgcaacttttggtaatttaattcacataaatttgcactttatatgtatatgtagaacatacctatttaaactcaaatgttgggcagccccagtggcgcagcggtttagcgccgcctgcagcccagggtgtgatcctgaagaccctggatcgagtcccacttcaagctccctgcatggagcctgcttctccctctgcctgggtctctgcccctctctctctgtcgctcatgaataaataaaataaaatattaaaaaaaattaaaataaactcaaatgtctagggccactgtgtaaggtaagatcaaatggaatctatctggagacttagtgactgagtctattggaacaacaataagttatctccaggaacaattctggtaagaggtacagcaaagggggcctgttctgcaaaaatcgaggttattactacccttaaaataaataaaatcgctatttaaaacactattgagtgcttactttgtgtcagacattgtgctaatagatataggcacatagcttatttaatactcatgatagctctatgagataagtacaattattatgctcattttacagagattttgtgagattaaatattttgtccaaaggatagaaatctgaaagttgttagacttcaagttcctgactcaacctacctcatcgtctttatcttctgccccatatttctataacccaccctcttccggtctcattggcctcctttctattcctagaaatgagccaacctctctgtcacctcaagatctttgcactgctgtttcctctgtcaggtaggttcttctccactgtgttgcatggcttggtccttatgtcagatgttcttctaaattagttctccttgccttactctagaactataacattgtagtactagttacactcaaactattttttaatctccccaccaggtcgcatccttagtacctcattcactgaatgaataagtaaaaaaaatagcctaccccttctgttcctgaaggtccttgttaatattctgttagactaataggctatctacgttatccccgatagtccactggaactatttagcaagactgcacattgcctacttcactgtcatctcagtttctcagaaagtgttccgtggttccacggcaacagtggtttgacactgtctagatgtctcaggggacaaccaggacaacagctccttgctctacctacttcgacctgcagggggcggtgtgggtggaggcctccttctgtgcgcggctgcgccgtcggtgaaccgagacgcagaagtgggaggagtggagtagagaggcggagccaaccggaaggggcggggttgtccacgaatccgcgccccccgggaggctttcctccctcgccccgccccttcccccgcccgggcggccatggccattcccggcatcccctatgagcgacggcttctcatcatggcggacccaagagataaggcgcttcaggactaccgcaagaagctgctggagcacaaggagatcgacggccgtctcaaggagtgtgagtgcgcctttccttccacataatcctatgcctggacctgcgtccgtctctgacaaagcagaggcccttagccgagcccggcatccgagctccagggataggaaggcctcggtccagggacaaggcgctttgtcatccggccctgagcttggaaagcacagcctcttcgggcgtagaaacggcccagtctggtccaggtgacagggagaacatccccagttctgagatggaggtggaagaggactagaggagtggaaagaagtgggccacggatgtttgccaggttgagtgcaaggagggcgcggcgctgtaggtgagtccgggacccagagaggagaggagactggagtcaaggaagctcaagcaagagagagactcgaggtgctggcttgttattggggtggaaagccagagcggagcttaagagaggggtccatcgatgggtgataataacctcccttgtctttcctgttatttggatttgactctatcaggcacacaggtttctcttaacctcctgcactaaaagggcgcttacattttttcgtagtgcgccttcactgcaaagcccgagtggtttgattaaatggagaaagactataaccatataattctgtagatcactgcacctgttgaccttatttagggccgaaaagtatagagtagtaagtaatccgtgcgggtagccgaagagatgagggaaagtctcttatcattcgttatttgtagtctcaaacccagaagtgtggttgtcagtatctgttaagaatgtaacaatgttatgaatgtgcttgaacaagtatggccaatcaggaaaataaaaatatggtgctttttctgtaacatttcagttttaaacctgtcctctacaaacggctttatttctttcatggtttcataaagtggctataaaatatactaaagtgaagtagactgagataagcttaagtaaagtgatacttagtgacttaaattcactgagattattgtttaattaaaaatgttcaaattgtattatttcagtaagggaacaattaaaagaacttaccaagcagtatgaaaagtctgaaaatgatctgaaggccctacaaagtgttgggcaggtaggtaatcaagttcggggtgtagggagtgatgacaatttgttttttgattattggccaaaagtaatgcttcttttttttttttttttttttttaattttccagattgtgggtgaagtacttaagcaactaactgaagaaaaatgtaagtggattggactgttaattaaaaaagaaaaagagtggactctcctttccatcatgaactttggaaatgttcattgttttactgataataatgaaagtagatgatattcttgcatagatttaagttttctttcaactattgtttccttggagaacggaaataaaactcaacctgccatccatgtggagatatatatatataaaaaatatttatttttcaatttctatttttcagtttatcctttcattttctttctctagtcattgttaaagctacaaatggaccaagatatgttgtgggttgtcgtcgacaggtaacactttacatttgtacagtgctttataattgataaaagtgctttcatatacgttatttgatttttgaggtgagtaggtcagacatgcccataactcctaaaggtgatttgttcagaataactagcaaaacttgaactcaaaccatagacaatgacctggtattctctattttctattcatatcacattgcctcagttgctctacatatttagaaatctaagaattttagaactggtaaatacctcagatcattttattttaaggtctttttttttttttaattttatttatttattcatagagacagagagagagagagaggcagagacacaggcagagggagaagcaggcatcatacagagagcctgatgtgggactcgatccagggtctccaggatcacgcacgccctgggctgcaggcggcgctaaaccgctgtgccaccggggctgcccttttaaggtcttttttgaggagacttacaccttatcaattactgatgttttatatttaaacatttaaaaatgatactcaaagacttttctgtagcttaagttgattttgtatgagttcatttagattagaataggcaaattaaaataactgcagatttcattttaccgtcataaaaaatggcaacaaatggctttaaataatttagtagcctctgaagccagtttatgtacaatcctattctttaggagcatcattagaacttttttaataataaaaaaacaaaaaccaaacaaacaaaacaacttttttagtaaattgattgaaagagctttttctgagtgtcacatcaggttcatgtttgaaaactgatacagcaagactgtagagtagaattttttttttttttttaatttttatttatttatgatagtcacagagagagagaggcgcagagacacaggcagagggagaagcaggctccatgcaccgggagcccgacgtgggattcgatcccgggtctccaggatcgcgccctgggccaaaggcaggcgccaaaccgctgcgccacccagggatccctgtagagtagaatttaacccagggactaaatcatatcccagcatttcacctagcatataagtgggaaaacatttcctaaatcaaaatattaaatggctagcctgacaaaggagttttatctaccttacaggccctctggattccaagagttggtatttccaagatatttcatggttgtatggggggcaagagagtatttgaagctggaaaataagaaaagccagaatagggatccttgggtggtgcagtggtttagcgcctgcctttggcccagggcgcgatcctggagacccgggatcgaatcccacgtcgggctcctggtgcatggagcctgcttctccctctgcctatgtctctgcctctctctctctctctgtatgactatcataaataaataaaaattaaaaaaaaaaaaagaaaagaaaagccagggtatatattctttatagatgtaaatgttgaaatagctttgtactgatttttgttgaactcttttcaagtacctcacttaccagcaattttatttaaagtttaatccattatattaaacctagaatttttgcctatctccccttcattttaattggcattaaattgtaaacttacagtactttgcagaatcctgtgaaaagtagtaatttgtatgattctgaaattgtattggcaagtagttttttaaactatcaaaaagtaacttaattttggaaaagtaatatcctgaatatgaggtgaatctcttggatagattctatctatagtctaataagttaccctgcccaatatgccagtaaattgttagtatgattcaacctaatctatgatgtatttatcataatatccgacatgtagcaaaagcatgaatgattcgattgctgggatttttttggttttggttttagcattttaataaaaacctctaagaggataaagaatgagtgcatttctcgcttaattcctgtagtcaagtaatatgttcttcctcaaagctatctgctttaaaataaatctaaaggacatattaccagagtaacactgtacaccttaaactgacacaatgttatatgtcaaattcatttaataaaaaataaataacaatcgactttaaaagaaaaaaatatatagggcatacctgtaaagtgctttcctttcctttccccaaaatgttcacttagagatttctgtataaatatttagtatcaaaaaaaaaaaaaaaaatttagtatcaattgccatagtgcctgaatcaaaataatgagcaaaactgtataaaatagtaagcctttggaagtaaaactaatacccatttctttctttaaaaataagatcttttccaccacaaactttgtatattagtgatttcacatttcacaattagattgcataacaggtacttgtttaagggaaagaactttgaattattacttttataagcccttctgttggcattgtattttaatctgatattagtgttctctctgaagggtaaaagtgattatttggtttctaaatattgtgctcttgttagagtattattttctcttttatgtgtcatgtaacactttttgttttataaaattagcttgacaaaagtaagctgaagccaggaacaagagttgctttggatatgactacactaactatcatgaggtgggtttcttattctatttattttattttcacagagggaagattttagctaaaatgtatgcttcttgagatcaatgaatatcatgctactttttcccttttactaatttctaattaatgtatatacatttttataagatcatttataggttcttgcataagcaggtcaatttatactctctctgtaggctgagagaaaatatatcttgtaaagaaaaatacgtaccttatcattatagatatttgccaagagaagtggatccattggtctacaacatgtctcatgaggaccctgggaatgtttcttattctgagattggaggactatcagaacagattcgggaattaagagaggttggtaatatatgctttgttctctgatagtactgattttaagacacccaaagagagaaagagaatgtaagattactttgtccaaatagtggttacaaagtattatatatttaatattcttgctgagaagagaaaaatagaactgaatttctagctatgaaagtaagttatctgtacccttaaatttttttttaagattttaaaatttttttgagtaatctccacatccagtggggcttgaattcagaaccccgaggccaagagttgcatgcttcaccgactgagctagccaggcgcctctgtaccttaaatattttattttgataaagctatttgctgccattcaagaaaactattggctttaggggggcttaaaccttttaaacacttaggtgaagagtcaaatcaggatttcttcacctcgtaacacagatggcttcttaacaattctctttgaagcaaattatgtcgccctatttatttcatcctaatttaggatggaaatgtttaggaatgagtgaggatagttggtatggcttacctcatctgatttaagctgtagccagtagttctcatacagttcacatagcatattgagttttctggaactcctattaaaaatagagattcatgggccctctgcatgatttccatgaaggagattggggaatggaacataggaattagcattgaaacaaacattccaggtgattatgaaaccaaattgtttttggtcattcttgaggaagcactcgtgtaattacaagtaaaagtctatttttactttgtagttaaagaaagggcaacagaggaacaacaaatgcttcatggaactgaaatcttgtcttttgcagtgatttgctgcatcaactgtagaagcagaaagtttctctctttcacacacacacacacacacacacactccacaaaacatatgcacatgtaataaccttttccatctggagacactaagaatattgacttcttatactttttgtttatttaatcacacctggtggatacaagtattcaatagaagcttatttctcaagttacttgtctataaagagtttaatgtgggcagtcaaaccctcaatttttctattctcgaatcaatcttagtaggacattaagagtgaatatatggttcttttttttttttttagtttttttttttttttttttttttttttcataatctctacacccatcatggggctcaaactcacaaccccaagattaagagtcatctgctttcccaactgagacagtcaggtaccctgaatgtatagttcttctaagtctactatgacaaaatgccaacataagaaaattttatatgccttttctccctttttttattttttttatgccttttctcctaatggcaattttaactttactaaattttcccattttattattttgtgttacagtcccaaatgcaaaataagaatttttttgttttgtttttcttttttgcttacctgatttttttgtagtgtgattttttttcattgaggcataatttacattcagtaaaatgcatagattttaattgtacagttcactttttaaaaattttatgtatttattcatgagagacacagagagatgcagagacacaggcagagggagaagcaggctccctgcaaatagccggatgtgggacttgatcctgggaccgggatcatgccccaagccaaagacagacgctcaactgcagagccacccaggcattccttaagtgtacaattcagatgtgttttgacaaatcatatgcctgtgtagcgatcacttgtgaagtgtatagtatgttaaaataattacagacttaaattaatttttacataattaaagaaaatttattaaatctacctaaagaatgacctctaatataaatggctttatgtgaattacatctgtgcgtatacctaactatgctgatactttacttaaagtatttttaagtttatcagaatctttactgactttttaagaaaccttcaacttcttttctaggtgatagaattacctcttacaaacccagaattattccagcgtgtaggaataatacctccaaaaggctgtttgttatatggaccaccaggttagtgttgaattatatctgacctactaataaatgaataaattaaggaataaaaaaggtgaaaagtgaataaattaaggaataaaaaaagtgaaaagtgaataaattaaggaataaaaaagtgaaaatttaatgtaggatcttccagcctccactctattcaaagtaaggaaagaataggacatgtgtgtctactattctctcaggtatgcttagtcctcttatgccttatagaatgttcatattaagatgttgtatgattctagtgttggtcctatgtggttcaccaacctctggctgtccctgaaatgttttcagggaatctgcaaggttaaaccttaatttgaaatactaagatgttagttgccattttcactgtgttgacttctatgctgatggtgcaacagcagcatgggtaaaactgctcctgccatagcattagtcaggtcagtggcatgaaatggcacaagtagtcattgtgttattgactgctcatatttgcaatattaaaaaaatatatatgagtttaacttttaggtgtccttgatgaagcattaaaaactgtttttatgaaatcctgatcttggaataatgtcttaaattctatgtattgaaatggaaaatacatgtaagtgcttctgttgcatactgaatagtatagttatcactgggaaaagcactggtatgttatttgagttgccagctgaattagctgcttttcgtggaatatcatttttacttgaaaacataatttatggacattctgtcattgtcagactggtttttgattattcggattggttattgcttatctgacaaatttttcaaaaatgaatgaggggcacctgagtggctttgttagttaggtatctaactcttcattttggcttcggttgtgacctcagagtcctgggtttgaaagtcccacgtcaggctccatgctcagtgccgagtcggcttgagttccctctccctctgtctctcctactcatgcaatcacacacactctttctctaaaataaataaatctttaaaaaaaatgaagttagcctactatgttacaataactgacaccatctgtagccaatggtaaaatttaagctttcaagtgaaaattaggttttcaaaacttatatctgacagggtttttttgttttgttttgttttttcttttttaagaaaaaacacatgtggggaggaggtggaagggcagggagatggagagggagagaattttaaacaggctccatgcttcagcatggaacctgacacctccagctcatgaccctgggatcatgacctgagctgaaatcaagagttggacacttaaccaactgagccacccaggcacccccatctgggattttctgatgttaatacttaaaaaaggagatgagatcggtgatattaacaaatgtgacttttacatattgtataatgaaaaatgccagctcgaagattttcatgactcatgaaccagtagcttccaaataaccaatagttgttacaatatcatgcataggtaaaagacatattcattatgcaggatagaccaatggattattgtgtaacaggcttctcttgtagggtctgtaaataggggttgatatatttttgaagtaagtattcagcattagaagggatttttttttttaagattttattttttcatgagaaaacagagagaggcagagacttgggcagagagagaagcaggttccctgtggggaaccccatgcgggactcgatcccagaactctgggatcacgctctgagctgaaggcagagccctgagccaaaggcagacactcaaccactgagccacctacctacgtgtctctaaaagggatattttgaataaaatttaaggttttaatattgtaagttgaagagttttcaaattataaatggaaattctctttaggatttagctttcatttgcaaaatttactatccagaggagtaaaaggcttttgagagtttgtttagtttccatctacttaggacttcttttgttattttaggtacaggaaaaacactcttggctcgagctgttgctagccagctagactgcaatttcttaaaggtaaagggaaggttctttttgtaactgttgaaattaaattttatttgaattgtcttatgtttacctaaatgtttttcctttaatcaggttgtatctagttctattgtagacaagtacattggtgaaagtgctcgtttgatcagagaaatgtttaattatgccagggatcaccaaccatgcattatttttatggatgaaatagatgctattggtaagaataacaccttttaaaatttatttgaactttttaaaaaagtcttaggaaatttttaaaattctgaaggagttcttctccccttctaatagcaatctgtgtgaagtaacaaaatggatgttactttatttttctttttcttgaacgttactttaaaaaaaattcttaagaaagcttaaccaattttagtttgatagtgacaaaattgagtaatgtcataacaaaatcaattctaagtttgtcagtataagtcttactattcattttttatcttaatgtttttaactgcagacactattattttgtcttcttaaatgatggttgtagaggaaagagtaacacatatgagtttccatgtcattttttccatatcattattttaggtggtcgtcggttttctgagggtacttcagctgatagagagattcagagaactttaatggaggtaatatttggtaaaggaggttaaaaagaagtcagtatgtattaaatgaaaacattggatatttaaaagtcaaaatgtgtacaatggtttgttgggctttttttttttaagcttttatttatttgagagagaacataagcagggagaacatcaggatgatggagagggagaagcagactccttgctgagcagggatcccaatgcagggctagatccctgggattatgacctgagccactcaggtgcccctgtgcaatggtttaaatgaagaacacacttaaggggcactgggttgctcagtcagttgagcatccaactcttgatttccgctctgttcatgatctcaggattatgggatcaatcctctgagttggactccacactcagtggggagttggcttgagattctttccctccgcccctccccgtgcgcacaggctctgtccgaaataaatgaataaatcttaaaaaaaatacacctaaatataaaatttgaaaatgtcaggaataaacacatttcactaccacaatctctagtaagaaaatgtctcctggaaagtaataggaatattacaaaattctatatgatgtacagctctactactccatgtgttttgagcagaccagccattcagatatttaaattgtatatttggggcacctgaacagctcagcggttgggcatctgcctttggctcagggcatgatcctgagtccaagatcaggctccctgtgaggagccttctacagagtgaagctaagtagtatagataacacaatgttaaattgtatcttagtaggggtatttgaaagggatttttcataaattacaatctgttcagaatatatatatagtattttcaaattagctatacctcctggaaaccttaaattgaggtgttttgaaagaacatagatactggtcttattcacataacatactatgttatcataatatgttaactagctatcagatattttggaaaagaaatacacattgttaagctagctatattttaaaagatttgttgaatgctgttagatttttcaatatttattcaagaacacttttggaattgaaggaaatatgtttaatgttttggtatttctttgtatagtggaattatttgaaaagatatttaatagattaattatcaaatatgtggaaatgtcatcaaatttgtggaatgtaaattttatgtctgacataccataatactgtatatattagacttttttaataatgtttttgaaaatacaaaaaaattgaatattggaaatcagatccacatagtttcattttataatacttgactaaaaaaaagtccattgaagtctgcacagtatttgtagacaatgtattttataatattagcatatagaattgtgtactttatattttttaatgattgaaatgttttgtaaatatctgtcaatgatttttatttacaaatatattagttactgaatcaaatggatgggtttgatactctacatagagttaaaatgatcatggctacaaacagaccagatacactggatcctgctttgcttcgtccaggaagattagatagaaaaatacgtgagttaaagttctttatctgctgtgtattctctttgtctatgtccacttttctttccatatctctgctcaccccctactttatttaaaaaacaaaaaacctgactgcatcttatgatttttcattttcagatattgatttgccaaacgaacaagcaagattagatatattgaaaatccatgcaggtcccattacaaagcatggtgaaataggtaaggaaataacttattttatgtatatttgcatttggtaaatgaagcaaaatgctattagatattgctgatagtctaccaaatttggttttaaattcggcaaacatggagatcttaaattcaactaatatttattgaacattttttgttaggaactgttctaagtgctggaaacatagcaatgaacaaaacagacaaattcctgccttatagaacttacattcttgtcaggcaagacagacaaagtcagaaaatttatagtacattaggttgtgatatgtgctatgtagaaaaataaagcaagggagataggtaatgcgaggagccagaatgaatatatacatctttaaatggaggtgaggtgggggaagcagagggaagctttaccaagaaggtgataaggtgatttttaagcaatgacctgtaaaggtgaaggaagtaggtatagatatttgtggaaaatgatgcaaagggaacagcaagagaaagaccttgaagcaggtgtatatatggctggaacacttcaggagtagcaaagatgccaaggtgtctgtggcagagtaagcagaacaatggtagcaagtgaaatcatagaaatgatgggaatcagattgtgtagagccttatttagatcattgtgtaagaactctggcttttattttattttattttattttattttattttattttattttattatttttttgtccttggaggattgtgaacagaggaatgaaatgatcttacctttgttatttttaactttgtagtgtagaaaattagaaatacaagtggagataagagtataatgaacttctaaccttacttaggtttacccatcccccaccaggctttaataattattaatttttggccaatcttgcttcatctgtaatctcttccacttaccttctggatttttaggaaacaaatcccaggcattgtataatttcatccgtaaatattttgaaattgatttatgttaaataagatcattctagttgcatgtagaggaacaaggatagaaacaagaggataagttaggaggatatttcaataatcagataaaaagatggtagtgtgatccaaggtggtaagagaatcttaaaatgatgagattctggacatattttggaaatagagattgcagggcttgctaatgaattagatgtggggtgtgagctaaagagaagaaccagggaacacttaggtttttgactcatgcgactgaaaaatggagttgtcatcatttaaaatgggagaagactggaaagattaggttttaaagggagagtaaggagtttggttctgaatgtattaaagctgagatgccaattagataaactaaatgaagatgttaattgataattctatatgcatctatggcttattgcagtggtctaatgctggtgatataattgtggataatagcataagattatttttaaagtcttgagattatatgagatttctgaagaggtaaatatggatagagaagagtttcaaaaactgagctaattccaatattaagaagttgagaggaagaaccatcaaaggagactaagaagctatagtcacagaggggaattaaaccaggagcttgtgatgtcctggaagataaataaagaaattgggcagcccgggtggctcagcggtttagcttcagcccagggcccgatcctggagacccgggattgagtcccgcgtcgggctccctgcatggagcctgcttctccctctgcctgtgtctctgcccctctttctctctctgtctctctcatgaataaataaaatctttttaaaaaaaagataaatgaagaaattgttacaaggaggcagtaattccctgttaaatgctgtgtcagtctcttcaataaatggtgctgggaaaattggacatccacatgcagaagaatgaaactagaccactctctttcaccatacacaaagataaactcaaaatggatgaaagatctaaatgtgagacaagattccatcaaaatcctagagaagaacacaggcaacaccctttttgaactcggccatagtaacttcttgcaagatacatccacgaaggcaaaagaaacaaaagcaaaaatgaactattgggacttcatcaagataagaagcttttgcacagcaaaggatacagtcaacaaaactcaaagacaacctatagaatgggagaagatatttgcaaatgacatatcagataaagggctagtttccaagatctataaagaacttattaaactcaacaccaaagaaacaaacaatccaatcatgaaatgggcaaaagacatgaagagaaatctcacagaggaagacatagacatggccaacatgcacatgagaaaatgctctgcatcacttgccatcagggaaatacaaattaaaaccacaatgagataccacctcacaccagtgagaatggggaaaattaacaaggcaggaaacaacaaatgttggagaggatgcggagaaaagggaaccctcatacactgttggtgggaatgtgaactggtgcagccactctggaaaactgtggggaggttcctcaaacagttaaaaatatacctgtcctacgacccagcaattgcactgttggggatttaccccaaagatacaaatgcaatgaaacgccgggacacctgcaccacgatgtttctagcagcaatggccacgatagccaaactgtggaaggagcctcggtgtccaacgaaagatgaatggataaagaagatgtggtctatgtatacaatggaatattactcagctattagaaatgacaaatacccaccatttgcttcaacgtggatggaactggagggtattatgctgagtgaagtaagtcagtcggagaaggacaaacattatatgttctcattcatttggggaatataaataatagtgaaagggaaaataagggaagggagaagaaatgtgtgggaaatatcagaaagggagacagaacgtaaagactgctaactctgggaaacgaactaggggtggtagaaggggaggagggcggggggtgggagtgaatgggtgacgggcactgggtgttattctctacgttagtaaattgaacaccaataaaaaaaataaaataaaataaacataaaaaaaataaataaaagtatgcaaaggatatgaataaataatttactgaagaattataaaaatgaccaataaatatatgaaaagacacacacacaaaaaaaaaaaaattaatgctgtgtcagataaatagacatctgagaatggacctttagatttactatgtggaggttattggtgaccttatcaaaacaattttttggagtgctgaaagagagagcctacctcaaatggatttcaggagattgtggcagaggcatggagttcagacatttctttcaaggagttctgcagcaaagggagaagaaaagaaatgtagctgcagtggaggtggagatgaagatttggaagagctttctttaagatgaaagaatttacaacacttttttaatgctaatgatctggatgagagagtgaaatttgataatgcactttccttgaagagagtttggcccattataccaaagtcccaaaattcaagccaaattttatcttacataaccaaaaactcacctttacaactaatttcttttaaaagattttatttatttattcatgagagacagagaggcagagacacaggcagagggagaaggagaagcaggctccatgcaggaagcccgatgtgggactctatcctgggactctaggatcacaccctgagccaaaggcaaatgctcaactgctgagccgcccaggcatccccgaatgtgtttattttctcagtgaaataggaagcaagttcagagtgagagatgggaaagtactgttagacatttgaagatgggagaagttataaaatagttatcttcagaagtgagagagtggactccaagatagttagcaaaccattgctgtgggtcaaattctatctgccttctctttttgtaaataaagctttattttaacatagccactccaatttgtttatatattgcctgtgactggtttcccactacaatagcagaaacgaatagttttgacagagaccacatggcctacaaagtctaagatatttactgtccggcccattacagaaaatttgctgactcctggactaggggtcgttatactattgtagtataattgccaggcagctttacaaacccttaaaagttaatggtcaaaaaaaaattacaaatagttgattattgcctgctactaactttctcattgtttacgtgaaaatagttttgagctggaaagactgagctaaactagggatgccaatttataggtttctttaatactgtgctcttgctaggtgccaaatgccgtgctaactgtgggaatccctgctctagggaagcttacatgaacttgaacctgaatcagaattaatgagtatctgtctgatttcaaatagagattgacatactctatgcggcctgacaaagggtatatatctcatcagaattaccctgtagggatatgtagatggctcagcggttgagcgcctgccttcagcccagggcatgatcctgaagtcccaggattgagtcccacatcaggctccctgcatggagcctgcttctctctctctgcctatgtctctgcctctgtgtgtgtgtgtctttaatgtataaataaatttttaaaaacaattacactgtagtagcccatgctgtgtcttatttttatccttactctatcaagtcaataactgctattccaagccaacagctcctcctttcaagtctgtcatgtggataaaaaggtcacttaaccattactgttatcatagatcaccacttggagcttgcatcggaaccagaaaaggtagccatttaaaaatggttgtttaaaaatatatgataaaaaaaatgatgaaaatgatttctgatgaccatttaaatatttggttacagtttttttttttttttaatttttttaatttttatttatttatgatagtcacagagagagagagagagagaggcagagacacaggcagagggagaagcaggctccatgcaccgggagcctgacgtgggattcgatcccgggtctccaggatcgcgccctgggctaaaggcaggcgctaaaccactgcgccacccagggatcccttggttacagtttttataagagacatggtttcacagatatctcaagttcacatgtacgtaactgttttgcttcatagaaacaggttaagatgctttcagatcttgatatttcttttttttttttaaagattttatttattcatgagagacaccagatcttgatatttcttgattttagagtttaagtagtatatgtatttctacttagtgctggcttacttaacagaagtataagttttggtcgttaatattgtggaggacttgctaaataatgtggaggaatgttaatagagatgatgcctaatattcaaagcaagctctgcagttaaattttccatataggcataagttagaaaaagtctaaatttttttaaaactaatttccaaaaaaaccaaaaacctaatttccagtattttttcctaaacagattatgaggcaattgtgaagctttcagatggctttaatggagcagacctgagaaatgtttgtactgaagcaggtatgagtttaaagtgcagtttttactattgattttaatttgctaaaaacatgtttgggtttatccaaaagcagagcctggcctttgcaaagatttgggtgcttggttttttggggaattgattctaagaagcaggagagaacaggcaagtgagttggaaagaagcaaagctattataagggtgtaccattaaggcagatgctatagacgtgggatttgatttgatgagacctcagagaaacatacagaatgcctcctaggattacctggctgatatggagactggagcatttatttcccagctctcatcccccatgagaatttgcccttggagatgttaactcctttttacttctggatgccttagggcaaaatgtggaaagacattcatgtgatagcatactcgccccctgaagtaaatctgccacatttgtggctgaaatcatactgggccagtaacagaagtaatctgctgcaaaatggaaaacatcttttctgattctagtctgttaacaatcagtgttgcaagatggatttaaatgttttttaattaatttttaaattttttaaaaaatattttatttatttattcatgagagacatagagaggcagagacataggaagagggaggagaagcaggctccatgcagaaagcccgatgtggttcttgatcccaggactctgggatcacaccctgagccaaaggcagacactcagctgctaagccacgaagacgtccctcccaatttttttttttttaattttatttatttgagagagagagagtctgtgagagagaacaagcaggaggaggggcagagggagaggaagaattagactccctactgagcagagatcctaatgtgggactcgattccaggagtaggagctgagctgaaggcagatacttacctgagccatccaggtaccctgcaagattgatttatgaattttgtgatcatgcaacttgtgtaaaatgtaatcatttttaatataattttctttgtgcattgtgtaatcctattttttattttatttctggtaccaagtagctttaaaaccatagctagagtcatttagtctttgtcctccacacaatctttttttttttttttttaatttatttatttattcagagagagagagagaggtgaggcagagacacaggcagagggagaagcaggctccatacaggaagcctgacatgggacttgatcccaggtctccaggatcacaccccggaccacaggcggcgctaaaccactgcgccaccggggaagccccacacaatcttaaaattaaaaaaatgaggggtgcctgggtgacttagataaatgtctgattcttgatctcaactcgggtcctgatctcaaggttgagtttactataataataaaaaaaatttttaattattttttgctgtttttatagttactgactttcataggttgcaggtgagtagttttaaagtattgtaatatgtgatttcctcttgttttcgtatcaccggtagctttgttttaacatttcttgtaaattaaacagtattaaaagaggttgctaagacatgacttcttcataggattatcttcatgggttgctcagacatgacttcttcataggattatctttatggatctattgtgactcaatatctggattaaaaatctgcaggtctagaaactcagtacagatcagagtaaatcatgctcacaaagacaaatatacaaaaaatgttaagtggtaaacttgcatgtggcttgaactacttggagtaatttacaacattctctttccaaaatcttcactggaccaaattactattagaatattgttgtgagggcagcctgggtggctcagtggtttcgtgccgcctgcagcccagggcctgatccaggagacccgggattgagtcccgtgtcgggctcccttcatggagcctgcttctccctttgtctatgtctctgcctctctctctctctctctctctctctcatgaataaataaaatcttaaaaaaaaaaaaaagaatattgttgtggtaaaataaaaaagcaatgtcataatcctaaaggttgataacatcaaattatgatacttattgtttttacatttttcagttttattgagaaataattgatacatatcaccatataagtctgtagctactgtatgatggttagatttacatatattgtgtaaatgatcacaatagtttggctagtatttatcttctcatatagatacaattagaaaaaaggaaaaatagtttctccttgtgataataactcttaggatttactctctttcctatatatcatatagcagtattagctatggtcatcatgttgtaaatccctggtacatatttattttataaatagaaatttgtacctcacatattttttgaaaattattttcagttggggtacctggctggctgtgtcagtagagcatgcgactcttgatctctgggtcataagctcaagccccacattggatgtagagcttactttaaaaaaattattgttagccatttccagtaaagagctataacgtctgtgtggattacaattttagctttttttttttttttaaggttttatttatttattcatgagagaaacagagagagagagaaagagagagagagaggggcacagacacaggcagagagagaagcaggctccatgcagggagcccgacatgggactcgatccctggtctccaagatcacacgctaggccaaaggcggcactaaaccactgtgccacctgggctgcccacaaatttagctttttaaatggcctgggacactcatatttggagacactgaaattctctggttttctttttattagacgtcaagcttttttgctaacatcttcctgtaatttaaaataaacttgattcggttataattatctttcccattcaaatcctgagatgattatcctttttggattagaatgtatctcagattcagtcatacactaaacaatgatttggaaatagtcatatgtacaaagtctggaaaaataacctactttagttgtagctttcaaaacaaggttttaaaatttcattattaaaaaactagaaatttccattcatctgatttttcagtacaacatagagtggctatttctaagactatatagaaatcttgaaaggaaagataaaagtaacccttgaaatcttctattccattgattgcatgcatgtacatgaaaagttaatataagcagatcttcaaacgaaaatattagtaggattcatttaattagcagatactgataacttactagttttagcttataatgaaattagggggatccctgggtggcgcagcggtttggcgcctgcctttggcccagggcgcgatcctgaagacccgggatcgaatcccacatcgggctcccggtgcatggagcctgcttctccctctgcctgtgtctctgcctctctctctctctctctgtaactatcataaataaataaaaattaaaaaaaaaaatgaaattaggattgtctcaaaatcttggaccccatatccatgatatatgtaatgttcaaaaacatgcacatgcgaaacttattgttttgtcaagtaacttgttgataacttgaaagttttcaagtttgtgatacttgactatgaaagttgtataaaatcccaatttgtacataaataatgtaaattttaatatgtgaataacggcactggctttttttttttttttttaagattttcttatttatttgtgaaagacacagagcgagcagagacataggcagagggagaagcaggctccatgcaggcagcccgatttgggactcgatcctggggtctccatgatcacgacctgagctgaaggctaatgctcaaccactgagccacctaggcatccctagcactggctttttgataaaaagcctagtgttggctttcttttattcctattatctaagcttttgaatattaacaaggaaaggctatcagaattactggaagtgttttgtgttcctaaaccatatatgtgttccctccttcaggcagttgttgtctatagagttaagaaactactacttaaaatatgttgatagttgagtttttgttttgctttttcagaatgtcattggatacagggactgagcgagctagattttaaatatccagatagttgcctcattgtggtttagcttttggtttggaaaataatgcttattatagttaaggaaattaagtgaacaatgatgcttgtttttaacaaattagaactactggctcaggggtgcctggctggctcagtcagtttagcatttaaatgtctttggctcaggtcctggagtcctgggattgagccccacaggaatcaagccccacaatgggctcgctgctctgcagggagtctgattctccctctgcccctcacctcactcatgctctcattctttcactctttctctctctctctctcaaataaataagtaaataaataaataaataaataaataaataaagtcttttttaaaaaaccagcaactactggctcagaagtaatacatttaggcttcttcacatttactccatagaattacttagttttcctaaaaaacgtttttttgagatctaattgactaataagattatgttgatatcaggtgaacagcataattatttgatacttgtttttgttatgaagtgaccactaatctagttaacatccatcaccacatgtagttaatgatatttttctcttgtgttgaggacttttaagatctactctcaacaattttcaaatatacaatacagtattattaagtctggtcatcatgctgtatatttcatctccaggacttattttataattggaaatttgtgccttttgactaccttcacccattttgcctacccgccccccttagttttcttcaaataaacaaattattcacatactatatacagcagtgatgttgttttattcttcacaggtatgtttgcaattcgtgctgatcatgattttgtagtacaggaagacttcatgaaagcagtcagaaaagtggctgattctaagaagctagagtctaaattggactacaaacctgtgtaatttactgggaggtttttgatggttgcatgacagatactggcttaatgtaaaaataaagttaaggaaaataatgtatgtattggtaatgatctcattaaaaacttatgaataaaaataagtatgaataacattaaaaattagtaattcagtaattctacttttaagattgataaagaaatttgtatgtttgttaatgttgcatttattgcagcaaaagttatgagtatgttgaagcttttcgtatttgctgtgtgagcattttgtaaaacattgaaagtagtttgaaatagtacaagagagcatttcttatgacttattttatatcatttgttttcttcatcctaaaaagttgaataaaatgtttgattcagttctcctacacatatttttgtcttttttaaaagtacatttattatggttctttaggttctttagtacataaactatttaataaccaaaatgagttgcatttagatcacaggcttttgaattttaaaactgcacccacactcagtgttccgaagagcatcttgttatataaagcatagacatgtgtgtctaaatcgataatgaaaggtctttactcttcacctattatgattaggctgtgtcatagttaattgaacaagtacatgcttatccataacttttttttttagattatgattaaaagtaatatttgctaacaaatgtgacttggttttcttgatttatgtgagatggttgttccctttttataatgttaaggtctggagcctcttcccccaaaaagtcacacattcatacacacaattatgcatatactaaagtgaaaggagatttattatatctcaagctcacccattgactctgtaggtatctatggataccaagctaagagtgtctgatgtaggggatgttgatgtcagaaatgttcaaagcaaaagttctgttacctacatacaattctttctatatcatgtggaattaaagctttaacaaattaaaataggaagtcatcatttgacttcaattgagattttgttaaagatgctgtttcaaaaaagccaattgacttcagtttcataaacactaaagaatgtaccatatttgatgtgggtagttacacagtcactctttaaacttacttgtggagtattgtgggtctttttataactttaaaaggtagagaacagtttaaatagtggtagagaaatggagtactcaagctagccatttaatattcaagttattgaccagttctatttctacattttgacagtgtgtttcataaatgtgacaatataaaaataataggatgtttgtcaagggggtccaggtcaaacatccctgtgattcttttaactttattcattgtaatttgcaatttagtttgacttcttatctttctacttaggtggtggtgttttgttttttaaagaatcagtttggtttacaaatcttgaaagtttaaatgtggattcttctgcttaattttcctcatccgtttgaaaataaaaaggataatagtatctccttaagcccagagaaagtatcctataccttatttctatttacaatatgttaacagactcaaactttaaaagatactgaaagccctgtagtttattaacataattatattaatatttcaacataaacttagaatgaaagagagcttccttcactatgatgtgtaatttactgagtgaacccataagttgtttctatttcttaggatttttatttccattgtttcttgagattttctagttgtcatattcccaagtattcttaaaagtccgtttcagtttgcttaaaagtgatgggttcattttctgtgtagcataacctagttttaagatgaactcttcatttattactcttttggttataaccttaccacagattgcgcagaattctgagggtagaaactacagttttcctttcagatgccagtttctggtggctatgatgttttgcccgttcttatactacaaaaaggaattgcgtcctgtctggaaagggcagagctggtctggcttgtcccaccgcctttcccaggaccttcagtcgttccctccctcctgccgcagccccacctcctccacacccggtgagcttcggccgttgcttctccgaggccccgccccccccgcgtctgcgctctggcgaaggggcggggcggcggcgcgctgacacctggcggccgcggggggcgggccaaaggcaagcgtgggctgggattggctggggcagcgcggggagggcggggggaagcaggggagacggttgtagggctcttgcttgtgcccgagcccgtgcggcctgaggggcgcggagactcagggggagggagacggcagcagcatggcggccgggtatgagccgcccaaccctcctcttccccgctgtcgccgccgtcgccgccggagtcgctgggaccttttagtctgcgcgtgttagttgtaagcccgctgcccgcccgtcagccctccggtccacccgccctccttcctttctctgccgctggcagcccgagggtcgggcgggccggataactcccactcccactcccaccccacccacaagccccagggccgggaccatggaggacgtgaagctggagtttccttcactcccgcaatgcaaagaagacgccgaggtgagtttgtcccgtgactgccacgcacaggcctcactgtgtggctccttgaccgcggggcgaccccaggccccaaacgtcgaagtctccagctccaccggagccctgttgcctcttgaggccgtcttgggacctcgggtggagctccgggacggtgtacctggaccctcattcactgagtatcttttcccccctggtggaggggctgccgggtctcatctacttaataaaaaggggaggagaaaagtaggtatccccccgccccaacccccaggcccggcttcgaggacttactctgagtaaggttcccctttttattgctaaggaaatacgaaggtaatgttttaaatctcaatttgagagagatttggtgtcatcgatttgcttgtgggacacatggcccccacacgtgaagtagatctggggcctcaactttcgaagtgtgccttcaaaaagttttccaaggtagttgtttggtttttttttttgttttttttgaggcaaaactgtgacccgcagaataaaatgtcatgaagctagcacatttaaatctaaaaacttaaatcatgaaacttgccctttggaagggagttgatagaatgaaattctttataacctttctcttgatttctaactccagattttgtttactccatcttcttccttgtctaacgtttgtattgagtttttcccccatctattgctagtttaaaacactttatggtgttgcacactactaaaatatttctaaagactaaattcagggatactcggaaaaaacaaaagacaaggatactcaattatcctctagtaggattgagaaaaattaaatttctagttctaaatatcttaaaaataattggaaagctgtatttttaagaaaccattcagtttacaccaaatattcttttgagtatcttcttttggggttctcattttttatttggagggatcctctgctcgtggtagtattttttgagaatttcatattttaagggtagacaaataggaaaaaaattgaatttaggttagtttaaaaaataaatttacacttttctttgtttaatatggaataatgtgaatgaggaatatgctttttgtccttaaagtgatttagtgatttcagtctggaagcaaccttaaggaataatatagaacattctcttttttcaggtgaagaaattgtagcttattgagaataagtgatatgccaaggtaacagtagtgtaagacacagttgaggaccttggtctcttgattcctaattcattgtgggtttgtttttttgtttaaagattttatttattcattcatgagagacacatagagaaggcagagacacaggcagagggagaagcaggctcccactagggagcgggatgtgggactccatcctagaaccccaggatcacgctgccctgagctgaaggcagaggctcagccgctgagccacccagggatccccctaattcattgtttttaatatacctccattctttcctgctctgatctttaaaattctagtttaaaatatttacagacttgcatttaatcttttattgtgtatgtgtcttattcctataaaaattataaaatcttactgggaacatagctttctttcctgtgcaaggacagatgtaatgcttaaagcctagtagataacgacacaagtattgtttactgaaagccaatttattgtttttttcatagcattgtatgtttgttttcttttggttgcaactgacaaaaaaccaactcagactagcttaagcaaaaagagaagaattaaacccagaaaggtagggatgcagctggtctcagggacttgactagacagtctcaatttatgagaactgcctctgcctcatcagtgcttgtctatactttctctcagggtttctgcttttactctggcttctccacagataaggagtttgactgccagctgcttcaaggtcacatccttacagagcttattacattgaggaataatatctctctaagcttcagtatttaaaatctagaagattggcttaacttaggtcatgtgtccatcttttggatcagaccctatgccataaagttgtgaatacaatgaggagcccagtctgggtcatatactcacttctgtggccaaggttgccggggagggtgtgaagtttatcatggatagtcctaccaatacccataggagcattcccacagaagatggaggatgctttagatggagggtgctttctggcagacaaaactataaataatcattaaacagggcatatagttactcctgataaactaataaaacaatgttaattttctaatttcccatgagatatataaagtgtcaaatggtcttacatagttatggtgaccagccaattaatagtgttcttccacccaggaagcatttcatggaaacctaaattacaatccaaatcttgttttagtaaaaatggaattgaagtagagaaatttttaatgcattctcttaatgatgtgatcaatctatgacagtttgatgatccgatcacctgtataagaatatcagttccttgttttctgaaataccagtcaaggcattctttcaggacagtactagccaaaatttagctgtgttcagatcagtttgcaagaagattgtcactcctctgtttaaaactttgctgtgatttcccattgtttgcaggatgaagttcaaacccttaaccttatttgcaaggttgtgtgagatctggcatctgtctgcctttgtaacctcattatgaactactctttcccttgctcccttctgtgtttgccctagccatgttcattttctctcagttcctggaatgttttggttcctgctatacacacccctccccagtacttttgcatttgctattttcccctgctgtggccaccaacactacccttgccctcacctaattaactgtttggtcttgggttagatctcactttaggtatcctttcttgagaaaggtgttccctgattttgccaattccttctgttccccttttgtacccttccactccccagaatagtttaatcctctaggtttataagtctctgtagcacttggtacttttatacctaccttttaacagatattctacttgtagttttggtcgcttatttgccatgatatttccatgaatatttcacaaggtagtttattcaccaatatgttcccgtcttattgcccactctttcttgcacttaacacagtgtccagttatatatcataagcttaacaaatgtttgttgaattaatgaaagaatcttgattggtgttgataatagaatcttgtgacaagattacagtagtttctttataggtatgaagaaaagaacagcttacgttatcaatttttaaataaattagttgcatagttagggttattggttttataattagaaattaatgttttcagatagaaaatgtaatataatttatttcagttgcaatttggcaactgaaatgttactttttttctcttttgatgcccatagtacagaataaaaaataggaattgcttaatatttctgattgagggcctttaaatttagaatgatgctttttaaatctgactgtagagtagaatcacccagggggctttttaaaaaataaccattcctagactccaccatcccctattctgatttaactggtctgataaggagtcagataattctgatggcagccaggtttatgagtaactaacttcaaagcatcttacttgaatgcccttctgccttttggttttagagtgaaaaactccttttgcctttggttgaagcgaaacttgaaataagaatgagaattaaaggaaaaggcttattatgaagagggctaccatttttggaggagagaaactgcaatactattttttctgttttgtgaatgtcccagctctagtatagtattttgatgattttttttctctgaacgctcctcccatcagctaaaattcataatctattttggtatttctaaaggttgttaggtttcatccagcctgatccatctgataataaggattaagtttttattttgtttaatggttacagcctatatcctttgctgtgtttatttacttatttactgatctttggacatttttataacatctttctatcccctaagtgcaattttatagctcacataactgcatttgtttgagaaggaaggagaaaacctgaaagtcctaccttcttcaatcatcaattgaggattgatgattgaagaatttttcattactgaatttattttcatcagaaccatagtgtgtttcacaattaggggtattttgttttagctgctttgctttggtttgaaaaaatatagttggactggttgctaatcatttaagtttggggaactgattctactaattaagtacagtagtaactcacagtagatcattgggaatctgccccattaccactactatctctaaactgatggattttagcagcaacgtgggcaggctgagattaagattgagtgtgatacaggcaagacttggttggtagagatgttcagacagatggacatctagtagagcaagagtgtgagcatgaatgacttaaaatcttgatttagtatgctaaaggtattagcagaattggtagagaagacaggattaagatttgttttgtagggtagttatcagggctagactctggaggtcaaaatcgaattctagcactaggaatagtttaatgaaatcttctgtgacagaaagcttttagatttcaaaggtttcatgcctattatggcaaatttgatgcttacagaaacaggctgtatggtttactgtccggtgaataggaataatttttcattctctcctgctaaacaacttgctttttactcctataatatcttccttgtataaatacagcatatacgttctattgtatacaatcatttggaagttcaaaattcctttgaaacctcttatttcactgaaaacttaggtaaattttgcattctatcccatgtggtcatgtttatttaattttatttatttatttttaaaacaaacttttttttaagattttatttattcatgagacacacagagagaggcagagacacaggcaaagggagaagcaggctccacgcggggagcccaacgtgggatttgatcccgggtccccaggatcaggccctaaactgctgagccacccgggcagccctggtcatgtttattttaatataaaaatgttttaaattagtggtcagtgaaaaccgtttttctcaaaaaaaaaaaaaaatcttttggtaaaattggtaatccagaaggaagcacatttatcctgtgtctttgccttctggcatagatattgccagatattccctggaatatatgtacaccatttcactatatacatcctcttttttttttcatgcacagtttagaaatttcattttaggtaactcaaaagtacacatttcttcaattgctattcttttttactctcgcaactggtaagtttctttgggaagataagacggttagactaagaattaagaataggaagaaagaaggaaggaaaggaaaggaaaaaggaaaggaaaaaatctagcatcatacatctccacaatgtatatctatcatgtgcttattctgtgacaggctctgctcagtgttagggatacagtgatgaaaatgacaagagtctttggcttaagttctttaaaaactttttagtataaaaaggttataacatatcattaaataagagatacataaacattcattttgtacaaattgattacatttattccttggaaattaaatacattatttctttttttatatatgtatatatatactttatttctataagttaattattttatgcagtcagaatttggttaaatacaattatgtctgccatatagttccttcttacattgagtggctatatagtgtcaatgtttctgaagtcagctgcttagactcaaagttacttaggctctcagtggctaaagtagaaatataagagagaaaataccttttctttgggggggtgagcagagagaaagggaagatcctaagccagagctccatatccagcatggatcctgaggtagggcttgatctcaccatcctgacatcatgtcctgagttgaaattaaagatttggggatgtttagccaaccaactgcaccacccaggcactaccttttcaaaaacatcttttggaaattcctttagtaagagtctactggtagtaaactctgtttttgtttgtatgggattaatcttttacttcactctgttctcaaagatgattttctgagcatatattctagattcatgattatttcaccactttctatgtattcttcagtcttctggcttttattctttcagttgagaagtcaaggggagtctatttaatctcttgttcttatttgcatgtttcccccttttttttaaaaaaaaaagattttatttatttattcatgagaatcagagagagagagagaggcagagacataggcagagagagaagcagtctccatgcagggagcctgatgtgggactcgaccctgggactccaggatccgcccagggctgaaggcaggcactcaacccctgagccactcaggtgtccccacatgttcccttttttttaaggaggagtaaaatttacagagtataatgcatagatattaaatgtgcaattcagtgaggttttttttttttaagattttatttatttgagagagagagggagagcaagcatgcacacagcagtggggaggggcagagggggagagggaaacagactccctcctgaatagggagcctgatgtggggcttgatcctgggaccctcatatcacaactgaagccgaaggcacacattcaactgactgagccacccaggtgccccaaattttgataaatatatagaccagtgtattactcttatcaagatacagaacatcaatgtaaaaagttatatcacatacatttccaggcaacccctatcctattccagataggcaatgaataatgatttttataaccatagtttagttttatcttcttgtacttcatataaaaggaatcatgtaaaaggggccctattgtttatgactgtttttaaaagattatttattttagggcagccctggtggcccagcagtttaacgccaccttcagcccaggatgtgatcccaggatcaagtcccaggtcaggctccctgcatggagcctgcttctccctctgcctgtgtctctgcctctctctctgtgtctgtcatgaataaataaataaaatctttagaaaataaaagatcatttattttagagcatgtgtatggatgggggaggggcagagggagagaatcttcaagcagactccccattgagcatagagcccaacttggggctccgtctcaccacatgtgagactacaacctgagccaaaaccaagagttggatgcttaactgagtaagccacccaggtgcccctatttatggctttttttcatttaacataatatctgtgaaactcacctatattgtgcttgtaagtagtagcagattcttttttattgctgagtactatttcattgtatgatcactgtcatgatcttggggtcctggcatagagccctgtgtggggttacttgctcagcaaggagtctgcttgaggattctgtctcattccttctgctcttccccctgctcatgtgttcacgtgctctctcttaaataattttttttaaagatttatttatttatttattcgtgatgggggggggcagagacacaggcagagggagaagaaggctccacgccagaagcccagcacgggtgcggggaactcgatcccggaactccagaaccatgccccgggccaaaggcaggcgccaaaccgctgagccacccagggatcccctctctgaaataaatttaaaaaaaaaaatttttttaagtcttttgtgccctctttaagatatctttgcttttttccaaggttgtaaagatattttgttttcttttagaagttttatcatttttgcagttgtgtttatacatacattcatcaagtatgtattaagtgcctattatgtgccaggcactgtcaccgagtgttggaagtagaatgcagcagtgaagacaggttaagatgtttgtgtgtgaggaggagtcaagatcagaattgattttattttccaaacatttatctattgttccagcaccagtcattgaaagactctccgttgaattgccttgttgtctttttaggaaaattaattagctgcatatgtgaaggtcttttggactctattccattcctgtttgcttttagtctacaaaaagaaattctgttcatgtttggtatactatttacctgtgtatttctttccccttttctagcttgggatttattcactgggctgcttatttcagagatgtgctgtctttaaccagttttggaaaacttttattactatcttgtgtaacattatctctcctttattttctttcttctccttttggaacttagacttcatggatgttagacttttaaattctattttatatgtctattaactgattctattttccaactctgaatttaggtaatttcttcaattctattttccagttcataaaatttctctttatctacatccttttttccctttagcctatccactgatttttaatttcaattgtattttttcatttctacatattcctttcagttctcttaaaaaaaatttcttaaaccttggtcatacttttggtgctctcatttctttttcttttttttttttttttttttgttctcatttctttttatattaaatgtatttttcattgtcctaatacctgcagcctttgtgaatgtgattcagttgtatctggtttttatggtggtccatttcctcctctttctttaaaaattcgcatttatttgtgagctcattgaaactcatctctgtgaattatttctggtctagattaggatatgcttctctgcagaaggtgcatttgcttctcccaagaatccatggacactatctacccaggatcatttgacattgaattttcacttggcctcacaaaaatcattgaattgtaatgccaaagttgagtgaaggccagattgtggttaggaagatcccattccaccactactaccacattctactcagtttcaaagctaagaaaggcaggagtattcatttctatggggatgaggtgagtttccttccctcgcctatctccccagtttatcattcactgagactgttgcctattggaatctcagctttctagtgttgatctttttctttttctttttctgtttctttttctttttctttttcttcttttctctttcatctttgatcaggtcccaggctttgtcttatgtctcacatgtacaggatataaaataaggccatgatgaggatgtggaacagctgcaactcccatacattgctagtggaagtgtaaattggttttggaaaacttttggcagtatctaataaaaccaaatatagtggggcacccgggtggctcagtggttgagcacctgcctttggctgaggttgtaaccccagggtcctgggattgagtcccacattgggctccctacagggagcctacttcttcctctgcctgtgtctctgcctctctctctgtctcatgaataaataaatgaaatctttaaaaaaacaaacaaatataggcctaccctgtgacttagtaattctaattccattgctactttttttaaagattttatttttttaagtaatctctatatccaatgtggagctcaaactcctaaccctgagatcaagagttgcatcctcttccaactgagccagacatgcacccctccattgctgcttttatagccaagagaaataaatgtgtaagtgcatcaaaggacatagaagataattttcacagcatttttattcatatttgcccaaacttggaagctacttaaatctcctgcaacaggacagtgagtaaattgtggaatattcatacagtagtatattgtacagcaataaaaaggaccggacagcatgtatgaatttcatagacattaggttgagtgaaagaaaccagacataaaatagtagtgatgcgattccattaatattaagttcaagaacaggaaaaactatagtgatagaagttagcgctcacttctgtaaagaggatattgcctgagaagagaaggagggaactttctgggatgacgaaaatcttgacgtgggtagtaattacatggatgtattgcctgtgaaaattcattgagctttacattcagatttgggtgtttaaacacttcattgtgtgttctttgataccccgttttaaaagaacagaaaaaatataaggccatgagaaatcagatcctctcaggatatgacttctcagagtttatagtctactaataccatattgccaagatccattttcaacattaaagacaaaaaaatactttctgttcattaaaaaaaattgctgtctcttttctgtagccaaactcaagaggtttgctacttgaggtgcattaaactgaacacagcccaaggaagtattgaaaacagaattttggggcacctgggtggctcagttggttaagtgtttgacttgattttggcttaggttgtaatctcagggttgtggaacctgtttaagatactctctcctaaaaaaaaaaaaacaaaaaaaaagatactctctcctctccctctgcttgcttgctctcttaagaagaaaggaaaagaaagcgaagagatttttattaatttgtcacaaggagacagggaaatggttctcaaagtactgtttcccccttggggtacatggatgaaacttttattcagtgtgctagggaataaggccaggggagcttgatacattaaggaatttacacattttattacctaggcacttggtttcagctgctcatcttagtatgtgaacatgctagtgtatacattgtatgttcaaaaaatggttgtaaaaccttgcccatgggagatcttaattttataatgaactaaaggtaaccttagggcaactcagagggcttctatgcaggtcctcagctccaaactggctcatggaggagggtatttgatggaacacctagccatagcttcttgttctgcaaaacagacaaattctttcctggctttaacatttctaccttatgtgttagaaatattttttgacttggaaaatctaggtgaagagtaaaggaaatttcctagcactatatttaacttttctgtaattctaaaattatttaaaagtgaaagtaggtttttttttttttttgagaggagggggagcaaagtagagggagatatttgtttttttatatatagatttatttatttgagtaagaggatacaaggggagggacgaagggagatagaagcagactccgccaagtgcagagcccgatttggggctctgtctcatgaccctgagatcgtgaccagagcagaaatcaagagtctgacacttaactgactgagcttccctggcaccccttgtttgtttgtttgttttattttttatttaaattaagtttaggagcacctgggtggctcagtggttgagtggctgcctttggcccagggcgtgatccaggagtcccagaattgagttccactttgtgctccctgcatggagcctgcttctccctctgcctgtgtgtctctctctctctctgtgtctctcataataaataaataaaatctttaaaaaaaaatagaatttagactggagagcaaatacacaaatgtacttctaagcaggtcactatgtagagttgtagaaattgcaagaagcattcactggatattagcttagcacggcacatattttctgcaaattgtttcaatcacagagcatttaaaataacattttgggttaaaaaaataaatttagttaacctatagtttcagaagtagaatttagtgattcatcagttgcatatagtacccagtgctgattacatcaagtgccctgcttaatgcccattacctgattacccaattcccccagcaaccctcagtttattccttgtagttaagagtctcttatggtttgcctccctctccattactttatttttccttcccttcccctatgttcatctattttgtttcttaaatttcacatatgagtgaaaaccatttgatatttgtcttctctgacttagtttagcagaatactctctagttccatccacatcattgcaaatgatccaaaaagatttcattctttttgatgcctgaatgatactccattgtgtatacataccacatcattatccattcatctgtcagtggacatctggactatttccatattttgactattgtggacatttccgttataaacattgggatgcatgtgcccatgcatgcatctctgtttttgtatcctttggataaatacctagtagtgtaattgctgggtagggtatttctaattgacatacaatgttacattagtttcagatacattacatactaattggacagttctatacacagctcagcgctctccattaagtgtaggtaagttctgtcatcatacaaagttattccaaattattgtctatattcctgatgatgctgtacttttaatccttgtcacttattttataactgaaagtttgtaccccttaatccctttcatctgaaaataaaagatttttttaaaaagcttttcaagtatttttttttttttttttttatgatagtcacacggggagagagagagagagagagagagagagaggcagagacataggcagagggagaagcaggctccatgcaccgggagcccgacgtgggattcgatcctgggtctccaggatcgtgccctgggccaaaggcaggcgccaaactgctgcgccacccagggatcccgcttttcaagttttaactttagaaaactcatttctctttataattctgagttttaagcaactaagttagaaacttttggaatgtagtccatttataaatgaggactatttgcaccatgtttgattcttcgtatcaattcactgtaactgcttttttcttttcctgatttttctatttttttaaagaattatttattttggggatggaggggcaaaaggagagggagagaatctccagctaactccctccatatgaggggtctgacacagggcttgatccaaatgatcctgagaccatgacctgagctgaaatcaaaagtcaggtgcttaaccgactgaaccacccaggtgcccctcttttcccaacttcttccctttttttttttttttttttttttaacattcattcattttggagagccagaacacaagagggaagggcaaagggagagaaaatcacaagcagactcctgctcaatgtggaggcaggtgcatgcaaggggaggcggggggcagagaatcttacaaccacaagatcatgtgaacggaaaccaagagtcaggtgcttaaccagttgtgccaccctggtgccccctttcccaccttttaaaatgttttctgtcttctgctgttggcattttgcgttatttcccaacttgtttgttttggtctgcattccaaagacagaatgaattctatacttttgtgaaatgtatctttaaagggaatcaaactaaaagacaggatcttaagctcaagtaagatatgaaaagggctgtttgataagcatttagaggtttattagatcagggatggcaaatacctgtcacttaacattctttcatccattaggtatacttctcactaatcgcagtactcttcttgaatccttcacacttagctatctacttggttagagttgacatgaatcacaaaatagctatttgacatttctgttttggaggatcagttttgagaaacttctagagtttgtgttcttttaattaatgaacgggtccatccattatatgaaataacatcattgtaattatggaagtacaattatctaaagaataccttaatctttgtttcttgtcacttaaaatttcaggtgtttgtgaagccagttttaatttatttatagaatattcttaaagtacaatgtattctttaaatatccatatattcatatgtcacatctttaacttttaaatgggtaacattttttatatgtcatttacttttattctcatgttttctttccatcttcaaggaatggacctaccctatgagacgagagatgcaggtaaggtaacctttttgtttttttaagccaacccatattactagtaccattattaaataacattatttcacaaaggatttgagccctgttggctcatgatttcatgtaggttcatcattgagtattttaaataatcagcatgtttaaggttaatcatggatcttaaaaagatgggaaatgaattgtttccttttttccttagattagaatcatggacatagtaataaatgtatgtgtaaaatgagtcactttgttttttcttatctgaaaaatttgatacagtatttttattccttttgaaaagtttgctttctctgtttgactagtttagaaaagtccaaaagaattgactataaggcaaatcactcctgagtaattgttcctctttgtgtctgatttccagtcaacttccataatgaagtttccagaagactgagttgaatactcccaatatggaatgataaagtgatagttaacccttgtagcagattgtttttctttgtatttcttaccatttacactctgctagccccagaatcaagcagtgtctcctgttcctgggaataccttgacttatgaaaatgtttcatttctttagtgaaaactctctttttaaaagtagcttagtatctgtgaggcattttatttggtgctttggggaatacacagatgagtaaagtgtaatttctgccacaggaagctggtaggagaaatcagacctatactcaaataattacagtttttcatagaactgaactacaaaattatactgtattagtatctaggatatgatatagtccaactgaaatctttttatgttgaactcacatagaatcaattttaatctagcatttggaaagtatttaaacaatttaaaattgttgaagctctgtcagtaggcagatatttggtattggtcttttttaaactttgcaatacttttattaactaaagataacaacacttctaaccttgtgtcttgagctacttttgatttggctaaataaggttttgtgtaattccaaaggggtgattttcttaatgcctattttatttctagactgtatgagagagaatataaataaaattagagatgttttattaataagtctaaaagacaatcatataggggcacctctttggctcagataagagttggattcttggttttggctcaggtcatgatctcattatcatgagattgagccttgccttggtctctgtgctgggcatggagcctgcttaaaattctctttctccctttcttcacaccctcggtctttatttatttatttttttatattttatttatttattcatgagagacacagagaaagagagagaggcagagacacaggcagagggagaagcaggctccatgcagggagcctgacacgggactcgatcctgggactccaggatcaggccctgggctaaaggcggcactaaaccgctgagccaccagggctgcccacaccctcggtctttaaaaaaaaaaaaaaaaaaaaaaaggatagtcttacaatatgcttattttacccaaactgctttttaaaaggcactgtggaaaaaataaaaaaataaaaaggcactgtggaagttcacatttcacattatctgacttttcaaaaccagatttaaactttaaatgtttcacctgatatataaagcacatctgcatttcctttcccaatcattggctcagtgtggctaggaaatgttccttaaataacaagctgttttgctaaaaaaaattattataacaactatggaaatactccacaaatccactcatatggtatatagtttgtatagatttaaatttttaatggtcaatatctctattttatttttcctaggaaattttacctggactgtttctaggaccatattcttctgctatgaaaagcaaggtatgaactttaggttaggttcatcaaaagactattaaccagcttttttgaaataaattttttagtagtaggcgttttatttgaggtaagatccacaaatattgcatgtcagcctggagtaccgacctatttaaattttactggaccagtcattgtcaggtatttcacaacaaatcacaaatgagcttttctatgtattatttttcttgtgaaatccatgtatttgaaagatttactaaataattgactttttatcctctaaaatatttgacatctatcattgctaatcgtatcttctgaacgatgaaatagaattaaatcctaaaacaagtatatttgacattttaatctttccttatcaagtgtaaatgtgtgtgtgtggagggggtgtgtacatgtgtatgcacatgtatcttaattgataaaatcttctgtttttgcaaacttcagagacctatgctccaggtcgtaaagtattatatcatatatatctgtctcctgtatagtcaaactgaaatggatttcattcattacacagttaacagggtagatctcattttactatatgcagcaatgttgttacttcctagaagattcagtcttatgaattatgacaatgctactaattcattttgaattataatgtgaaatactgtattgcatgctttccccaatactctatttagaagtcagtattttgtatgatatctatctacagtaggttttttaaaaaaaacaaaaacaaaactagaatttttaactttaatgatttaatttaatgtatttatgaattttagatgaatagggagtttttttttaaagactttatttatttattcatagacacagagagagagaggcagagacacaggcagagggagaagcaggctccaagcagggagcccgatgtgggactcgatcccgggtctccaggaccacaccccaggctgcaggcagcgccaaattgctgcgccaccagggcttcccaatagggagttttttaaatttagagtcatttctttgaaactggaaggctttgtcactgttggcatatgtaagagtaaacctagttttgatgccctacagctaggatggaaagggtagggtgttggtaaaaaaaagtactaaggaaaagatagataactcacagacttaactgtgagttacttaagataaacaaaagccaaataatgtagtattcacaaaatactggccttcaagatagttttagattacttgctttttgtatgcctacagcattttataaatatacttattatagtatttgtcagattaaattataagtgtttacagatcgcctcaaaacctcttccccctcagtttcaccatgctctaattattagactgaggaaaagtttctatggcaaaatttgattatttcccattctgaatcaccatactacagtttatatcccttttttataccatcatccaaaaaatatgtaacaacaaatgataatagagaccaagaaacctaaactccttttctaatactcatttagttaagcctaccttttattgcattcagatacatttgaactgtttcttcgtgtataatttttctgtgatttgtaggtatgagataagattataatttgctttatataaatgaaaacccgttgaaaagtagaaaatattctgtatgctattacatttgagttgcattttgtaaaggtttgtttttactagtaatagtctcatatacatgccttcagtgcttgttaaaccaggtttttatccagagttatgtgcatcttctatggtttcttgcagtaataacgtagatatgaaaacttctttatatattacagatctatataaacaaaagaatagatgttgaggggcaccagggtggctcagtggttgtgattctggggtcctgagatcgaatcctgcatcaggctccccacaggaagcctgtctctccctctacctatgtctctgcctctctctgtgtctctcatgaatgaataaataaaatcttaagaaaaaaaaagttgaatacattttggaggtttaataaatgtgaatatggaacatagattaaatcttaatcctaccgaatgcttacctcctttcttctaactcaggatacactcaggaaatacagacataggaaaatttgctgcaaaaattaacatttaaaacttttgaaaacctcattttcttagctcaggatgctataataaaataccatagaccagtggcttcaacaacaggcatttatttctcacaattgtagaggctaggacatctgagatcagggtgccagcatagttaggttttggtgagggtcctcttgctggtgtggagatggctgcattcttgctttatctttccatggcagaaagattcaagctctcgggtctcttctcttaccagagcactaattccatgatgggacttcaccataatgacctcatctaaatctaattacctcccaaaggccccatctaatactatcatcaccttgggggttaggacttcaatgtacaaattttgacagagacaaaaatactcagtccataacaaatatgaattattctttgatttctaacataggttattggtattattgttctggatttaatgcagaaagtaggaattaaatatataggaatataagctgaaattatagaaaactcaagattctgaattctgattcctcttgccaggatgattttgttcatttattgaacagataattattaaatagttaatatgttcaaggtactcctacacatacttaatatgaatcagtgaacaaaatccttgttcttaggaatttacattctaactactaaaatatgtcattatgatatatagtatatatgacacatatatacattatctaacatgttactgtattcactgaaacctgtgatcacttgcaaataaaaacttgatatatcgaggattgtcatattaaattgttttaaatgtagagccaaaaatgtcccacagaatataatatcatttggagttaccagttttaactttagaagaatttttaaactaaaatgttagtagtctgtgaactgtataaattaattctggcttgtaatagaaaaagtttactgggagaagcaaggtatagtctagagatctgggctctggttgctgatattaactatgttggtgatgttcagtaactgtttatgtgtttgtagtcccttctatagaataaagaatggtagtcaatatacatgacaactatttcctgaatacctgccatacatcccaggcattgtgccaaacatctgatatatataattcatccatccgaccactcaatgaaaaggttaatattttcccccattttcacatgggaagactgagccacagagtgctcaggtcattagcagagctggaatatagagcttgggctctcaagactccaaagcccatggctttaaccactgtgtagtagtagtgtttcccaaataaattgtctttaaggtctcaacaagctctaaaatcatgtaaaatagggacatctgggtggctcagtggttaagtgccttccttcagcccagggcgtgaacctggacttccgggatccatcccacattaggctccctgcatagaacctgcttccctctctgcccatgtctctgcctctctctgtctctctcgaataaataaagtcttttaaataaataaaattaaaaattaaaaaaataaaattgtgtaaaacaatcctattgaggatacgtgatatatattaatcttgaatcattgaaatatcttgctgatcatttcagatctattattataaaagtagctttaatcccctgtacttagttaaggttcatatgtggctgtattaattctaatgttcagttgtgcatattttcaaacatctatggtaaaataagatgatgttttgtattttaaactatttctctccctgtccctcttttttatagctacctatactacagaaatatggaataacccatataatatgcataagacaaaatattgaagcaaactttgttaaaccaaactttcaacaattatttaggtaagaattattgctttgatttattaataaaatgtatgggcagcaaacatgtaatgtagtttttatttcaagttgattttattacggcaaacttctctgtcttataaggatggtcatgtatcatttaaaaaataagtttcctgggcagccctggtggctcagcggtttggcaccaccttcagcccagggtgcatgatcctggagatccggggttgggtctcacgttaggctccctgcatagagcctgcttctccctcggcctgtgtctttgcgtctctccctgtgtctctcatgaataaataaataaaatctttaaaaaaaaaaagttttctttaaaattttaagcaagtaatacatataatgcagaattttaaagattaaaaagcatgtataatatactgaaaaatttccctatttctgtcccttatatactcagttcctctctctagagggatccactcttatttttgagtggcacccagggttatattatatatatataagcatatttctgtagataaacttttattttttttacccttgctttaaaaagtttttaaaatatattttagagatcacttcatatcattacttagctgtattgtttttttaaacttgcatgggggatgcctgaatggcttagcagttgagcatctgcctttggctcaggctatgatcctggggctggggtcaagtcccacatcaggctcccttaggggagcctgcttctccctctgcctgtgtctctcatgaataaataaataataaataaaatatttaaaaaaattaacttgcattataatccattatatagctatactaaaatttattcaacccgtcttctgttgggcatttagattgtttccagtctttgctaatatattgagtattcatctacatgtcatttaattcatgtgtgaatatatcagttggataaatctgtagaagtggaattgctggaacaaagaatatgagcatttaaaattttaatggatgttgtagattgccctccagtgacttctatcagtttacattcccactctaaagtagatgagagagactttccttggttatctctccaagacagaattattaagcatttttaatttttcccaattttctagggtaaaagtgatgtctcatgtagttctgatttgcgtttctcattataatgagtgtggttgagcatttaatggtttttactgctattttaattctattttaaaaataaagcatatgtattacacatgatacaaaaaaaaagaaaaggtggaaaaaaggtatataaataaagtaagtctcttccctcctctaaacccagccatctggcttccctcctgggaggtagctactgttaacccttaaaatatcatcagagatattctgtgtgtatataaaagcatgtatgttaaaaatattttaaagtactgctttattaaaatttgtaaaaatgaaagcaacctgagtgttcatcagtacaacatactctaaaatatattgtgtaaatgtataatagaatactgtaatcctgaaaaagaatgaaatatttctatgtatgttgatttggaataatcactaagatttattcaattaaaaaaacaacaaaaaaacaaaaacaacaacaacaaaaaacaaggtgtacaacccagtgtatactctgtgtttaaaaatatatacaatatgttaagcatatattcttgtgtatgtgtagaaaatttctagtctaaaagaccagaaatctggtgattgcttctgagaaggaaaattcagggtctcggatgctagaggggcatattttttactgcaaatatttttatactgctagaattttttaccatgtgtatacatttttcagttaatagaaacttactttaaaaaaggaatatctagggatccctgggtggcacagcggtttggcgcctgcctttggcccagggcatgatcctggagacccgggatcgaatcccatgtcgggctctctgcatggagcctgcttctccttctgcctgtgtctctgcctctctctctctgactatcatgaataaataaataaaatcttaaagataaataaataaattaattaattaattaattaattttaaaaaaggactatctagggcagtccgggtggctcagcagtttagcgccaccttcagcccagggcctgatccctggatcccaagtcgggctccctgcatggggcctgctgtgcctctttctctctgtgtgtctctcatgaataaataaataaaatcttaaaaaaaaaaaaaaaaaaaggaatatccaggggcacatgggttaagtatctgccttcagctcaggtcataatcctggagtcccaggatagagccccatattgggctctctgctcagcagtctgcttctccctctgcccccctcctccatttgtgtactgtctcttgcttgctcactcttaaataaaatatttaaaacaaacaaggaatgtctgcattctagaattagatttaatttttttctaattataaaagacatccttattctttatagatattttagaaaatatagattgatgccaagaaaaatataaaataatccctaattccacaaccgagaggaaacgctttagttaacattttggcatattccttttaaatcttaaccctattatacatgtgtattatatctacactcatatagacttaacatatattaaaaataatgccatattttaaatgctatactagagatttctaatttatatagtttttgtttttagtatcaaaatgtcctaggtacagctttttttctttttttttgttcctttttaaagatctatttattcatgagagacagagagagaggcagagacataggcagagggagaacaggctcctcacagggagcctgaagcaggactcaatccctgatcccaggatcacaccttaagctgaaggcagatgcttaactgcttagccacccaggcatcccacagcttttttatcccagtggaaaaaaccctttgtccttaggttcagaatattgaattatagactgataattctgctaatagttttgtttttgtttttttaaagatattatctttttataaatacttaatactccctgcaggaagcccgataagggactcaatccctggaccccaggatcacaacctgagccaaaggcagacactcaaccactgagccacccaggcatccctcagctcagatcttgatctcagggttgtgagtttgagctcgacgttgggtgtacagattacttaaaaataaaatcttttcgggctctttgcgtggagcctgcttctccctctgcctatgtctctgccttctgtgtctctcatgaataaataaaaataacattttttaaaaaagggacacctgggtggctcagtggttgggcatctgcctttggcccagggcatgatcccaggatgctggatcgagccccacattgggctccttgtggggagcctgcttctccatctgcctgtgtttctgcctctctctctctgtgtctcataaataaataaataaaatcttaaagaaaatcttaaaaaaaaagatctgagctgagattaagagttagatgcttagggatccctgggtggcgcagcggtttggcgcctgcctttggcccagggcgcaatcctggagacccgggatcgaatcccacgtcaggctcccggtgcatggagcctgcttctccctctgcctgtgtctctgcctctctctctctctctctgtgactatcataaataaataaaattaagaaaaaaaaaaagatttaaaaaagagttggatgcttaaaaaaaagaaagagagaaagagttggatgcttgactggctaagccacccaggctttccaactgctaacagtttttaatattcaacatgacatgtagtagaatattttaagattgactctgaattaactttttttccctgtaatttagcctacatagtcactttaggaaacagtcattgttagaatccttttgggttttacattggattgtccttggatactgagtttcagcttctctgataagctctgaatttattgaagttgtgactaaacaactaaacaaaataaatgattgctttagtacttaaacgatcactaaagaactgtaatttttaaggcaatattgactttaagaattaattttgaatcttagttaaatattatagttgtattactaaactggtggtctggataagttagagagggaagtttttcacaaaataaaataagcctagcatattaatgatgtcttcttattggtgttttccaaaaaactacaaaattgtaggacaagtggttttttagtgggttttgctctactgaaggttagttcaagcaatggatgtttgactcatggctcccttagacttctattttgcttaccttctctttcagagaaaggggttgtgcttcctcggaattgtcctcagtggcattgtgaggaagggtcacagggctactcaaagaagaatcttctagtctatggggaagttagtagaaatagagtaacaataaagaatacaaacagtttttgtctttattccaggtccactctgatctagaggaaagttttcttcctgtcatttttcaattttaaccagatagattttttttttttaatgtaaaaatatcagaaatgttaacttatttaaggctttaaatgctatgcgtttaagcagtatacaaactatgaccaaggtcttgggaatatgatgctttgaaagttgtttcgcattattttcatggttgtcaacaaattttgaagtttcttgtttgtagagttttgtctgaaagtgtgcttatcacagaatattctattttcagatatttagtcttggacattgcagataatccagttgaaaatataatacgttattttcccatggtaagtatcaaatattttattatcacttataatttatgatttgtctcaattatggttctaaaaatttgtaatagttgcatttgtagccttttggaaattcttgaattaaggcaatattaatatgagtcagcagtaaattttttcaatatattttgttttactctatgtattttatgcttatgctaatccactttttcttaaaacacactgtcttgccttcagactaaagaatttattgatggaagcttacaaactggaggtaagtaatattttcttagtgttcatttttagattatgtgtcatagttaattttttagttaacatttgtcttaagtgcagtatatggaggttgcaattgtaggtaatagactattcccaaatttgtgttttcccaattccttgtttcatttggataggctttcttaaatatccctataagtattttcaaatttttgagtcagctttgaatcccttgaatttcgggatccctgggtggcgcagcggtttaacgcctgcctttggcccagggcatgatcctggagacccgggatcgaatcccacgtcgggctcccggtgcatggagcctgcttctccctctgcctgtgtctctgcctctctctctctctctctctctctctgtgtgactatcataaataaaaaaataataataataaaaaaataaaaaaataatgaatcccttgaatttcaaagttaaattgtaaagttctaaagttaaataaatatccaagtgatttgtataaaatataaaatgtttaagaaaaatttatcttactatcttatttatcttattagtattattttagttgctgagttagatgtttttttgtgagaataactatttcttatttttcaggaaaagttcttgtccatggaaatgcagggatctccaggaggtatgaagttaaagattatttttctttttttctagcatttaattaatgagctctgttttgtatttttttttctaaaattttttccccctcttcagtgctgcctttgttattgcgtacattatggaaacatttggaatgaagtacaggtaagaaagtactctgaaacatagccatgtttaaattctcattaaaatgaagcttaattgaaagtttgggaatttgcaattgatatcctgattttgttatctatttatgttgattagtcaggctcttgtatcccacgattaattagcctcttaacctttgtagcttgtccaccttgtatatatctacttaggctaacattttgtggttttggggagttagtgctaactgttgttaagaagccaaggtagttatatttggaaataatcatggaaaattatttgctgctagagaattgtgtagtcctagtttaaaaacttagatgcagatattatttcttcccttgcttaaaaggctaatttattatgttttcctttaacggcaattggataaaaaattacctagaagttgtttcaggttctttcacaattcagtgtagtctttcttaaccaaaatcagcttttccaagcgtattgcctagataaaaaagagagccctgaaataaatgcctgaccattgtacattgtttcctttttttttaagtgtgtcttgtacaagttagaaatcttgtaatcattggcaattccttgtctttcactccccatctcccaaatttatcattactaatcctcttttgcatcctaaaatataccttgaatctgtctcttatctttctctttatcatcatttaatcccctaatcgaagctccagtcacgtctctcttgggctttaacaatggtagtcttcttagtggtttcatgtattctctccttctccagtgttttttccccccacgctacagtcagaatgatcttttcaaaagataaatctgatcaaataatcaccttatcccaaaaagctttcagaggtttctgatccttaataattcttatcatggccagtgaaactttgcatgatgtgcctgtatcaacctttacatcattataccattttccctgttcctctcatttgagctgtattcagcattggatcaatattcctggcacacagtatactcaaatgtttgtttagtttgtttggtatcctttaagtttagattttgatggaaggttggcttaaaagtatcagttaatattatttgaatacaaatgctttgtttaattgaaaaagattagtgctcggtagactatgtttatgtattctctttattatttggtgtcttgatagtaatagtgaaaatagcttccacatttcgggtctttgctatgtgctaggtattattctaagctcttttatctcatttaagttttacaacaaaacaaggaagtagatatacttttccttgtctaacaatgataatattttgagcacatactatgtaatagatgccatataaggtgctgtaaacctattatcatgcatctcacaatagccctccaaggtaggaatttttataatcctcaatttacaaataagaaaaagcttagaaagttcagcagtttcccttagaacacaagctggtaaacagagggatggtgatatttcatctgcccatgctgttcatttttctactacaactcactacctctctgtagtataagctttatgattatgatttcctgcttaggtaaatttttgggtaagttcctattttaggtaaattgagattgattcatgaaataataccatcaccttagttttctgtttttgttttcagagatgcatttgcttatgttcaagaaagaagattttgtattaatcctaatgctggatttgtccatcaacttcaggtaacttctctctttctcctctttaaagtaatcggaaagtagtgtaattaaaatcttacgtccatgtaatttaagtgtagaatttatttttttatttttaaaattttatttattttttaaagattttgtttatttgagaagagagagagcatgagtaggggatggggagagggagaagcaggctctctgctgagcagggagcccactcgaggctggatcccagaaccctgagataatgacctgagccgaaggcagacacttaactgactgagccactcaggcgtccctagagtttactttaaatattaaaaaattaccatagtcaggggctcctgggtggctcatccggttgagcgtctgactcttggtttcagctcaggtcgtcatctcggggttgtgagatcaagccccatgtcaggccccatgctcagcgtagagtctgcttgagattctctctccctctccctctgtccctcccagtcatgctctctttctctttctctctctctctctctctctctctctgtctcaaataaagaaatcttttaaaaaaatgaccatagtcaaattttatttatttttccttttaagtaatctctgcacccaatatggagctcagattcatgaccctgagatcaagagtctcatacttctccaactgagccagtcaggcaacccctaatttgattttttattcaagttcaaatttccagctaaaggtattttctttcttttttaaagtattttcttaaaagctgccattactgtgacaaaagggttaaaggcatatcgttaaatgtaagagaaaataattgatgttagaaatttttcagttttttcttttttgattacacagataaagaatattgactctaagtatactatatgtagcagcttttataatctattttatgtttccttttccatgtttcaaattttattggtgcctagaagatgcactaaaaagtaagatatacctgtgaagtatctgtttaaactaagtttatttaattttttccaagaacgaaaatcagattgaagaatgtcctctggctgattctatccagttatgcaggaataaatctcacattgagagacatcaagagcattacaaaatgctaggggtacctgggtggctcatttggttaagtatctacctttggctcaggtcatgatcttgaggtactgggatcaaccccacattgggctccctgatcagtggagagtccacttctccctctccctctccccttccctacttgtgctcactttctcaaataaataaaaccctaaaaaaaaaaaataatgaaatggattgtctcagttaccaaactacagggttttttgttttgttttgtttttagtttttattagtttttacttcatttaaaacagaaagtgatatgtctgactttagcatgtttatgtaaaatatttttgttccttttaaattgtattatgtaaaactagaatttgtaagtttctttgccttttaaccctgttgtttaaaaacattgtcttttaaaattgatttttgtatttgaaaaagtaacatatacacatttaaaaaatacagtatatatacaagtctaactgcataatatatttaattgcatgtgtatatatgcatacatatatatgcatcacaacttcatatattgattcctcatacataaaccttttactttatttatttttttaaagattttatttatttattcatgagagacacagagagagagaggcagagacacaggcagagggagaagcaggctccatgcagggagcctgatgtgggtcatgccttgggctgaaggcaggcgcttaaaccactgagccacccagggatcccacataaaccttttagatagtctctagcctttaatgatttaacaatattggggaaaataaactggtaggtacattttgtttacatgtgcaaatacacctgtaagataaatatataaagtggaattgcagggtaaggggtatttgaaattgatgttaccaaatagtctttcaaaaggctgaaatagtgtaagaccccccaggaaacagtatctctttcctagtagttcccattcagtaccaattgccaaaagtattttaacagattttctgatcattgtcatcatggtggtgaaagtggtgactggtttgttcattcttctatcagatttttatgtttttctcattggtttataagagctctttctacattaaagaatgtctttagccaactggtttgaaatgccatttttattatataccaaactctgatctatacttgggtctgtttctggactttgaattctgttccattgctctgcttaatgctgcaactgtatcaaaccattttaagtactgtgatattatataagtaacttatggcatagctcaagattccctcattaacgttctttctagaattttcctggcaagttcttagcatttattttttggtgtgaactttactggaaagagccctatattttttaaattgctactatattcacagttcaaaaagaattgacacctttacatttttagtcttcctctccaagattccatttattcaaatcaatttctgtgtccttttgtgttttaaagttttctttgtgtagaacatatttatttcttatgaaatttacagtatcctgtattcagcacaatatactcagctctgtaggcagaatcgtattatgagaaattattcctctacttaaaagacaaaggccttatttacagtggtttataaatccctacgttatgtagtcccttacctctctattctgatctcctcctatccatttcatactatatatactcaggtcacactgaccttcatgtaattacttgaaaatactatgcatgttctcatctcaaggcacttgcctgtatctcttcacatctagaatgcgtttctccaaatatctgcatgacttgtttccttaattttcttttgactgtattgctgcaatagcttcctaacaggtatacccacctctacccttaccccctaatccctacaagtcaaaagaaaatactagtttggaccaaaatggtaggggaagaggtgagaagagggcacattttggatttgactgtatagctgacaggatttgctgatggattggatatgaagagagattagaatgaatctagtcctctatggaagatatggaagaaactgtatgagaaggtttacagggagtaaaatcaaggtcagttttggtcagattagagggctgttagacagtaggcagttttataagttcacagtttatggggaagaaccatatatttaaggaatatcagtatgtagatgctactgaaagccctgaaactgggtgagatcactaagggagtgtggatagagaagaatttccaaaacagatcctaacgtactccaacatatagagggtggggagatgagaaattaatagaagagatgaaaaagaatggccagtgagataggaaaaaatcagggtggcttgatgtttgggaagtcaagtgaagaaagtgtttgaagtagggaatgggagtgcctgggtggctcagttggttaagcttctgactcttgatttcttttttttttttaatttttatttttttatgatagtcacagagagagagagagagaggagagagaggcagagacacaggcagaaggagaagcaggctccatgcaccgggagcctgatgtgggattcgatctcgggtctccaggatcgtgccctgggccaaaggcaggcgctaaaccgctgtgccacccagggatcccttgactcttgatttctagtcatctcataatctcacaggtcatgagattgagccctgtgtcaggctctgcattcagtggagtctgcttgagattttctatctcccctgcccccctaaaataaaataagtaaaataaaatatcagtcttttttaaaaataaaatatcaatctttaaaaaaagagtggggaaggaaccactatttcaaaagctgataatatattatataagatacaggctgagaatggacattcggtcaggaacatgaagtccttggtgtccttaacaaacaggttttgtggaaggggaaggataaacattgctcagagtttaagggaaaatgggaagagaggaatgtaaatagcaagaatagatgattctaggaattctactttgaaggggaaaatggaaaggacagtagctagaggggaaatgggttactaaggaggattttatttgttttctaaaatggtaggaaatatggcatatttgctatttggaacaatccaggagaaaagagaaaattactattacactggaatgggatagtgtggccttttctcgttgttgattctgttatattcattatttctatggttttatttttttctcccaagttctgatagttggtatgtcatctttttaattgttacatttcttccatgagtccttttatttcttctttgaactcacatcagaaatgccatattctcattgatttcatggagaattaatcattttcatctgcttcatggtgtgattttcatgcaatgctcttcataggacttttcactataatgttgaaatagtttttttccccttgtgccatctttatgctaaaacctgcagtggttcctttttgattattggtgatctttgtactggaagtattcttagaacagctatttgcccaacagtaaagttgtgggagaggaacctgggtagtggttggggaaggcaaacagcttaagttttctcacttgtcttggaagactttcccaccaacacttttttctggtggtttaacttagtaagaagcagagcgccccttatgtcacgggtttttcttgtttgtattgataaacatggcatgcacattaaagccatccaggggaatctaacttaaaccaattaaatgagaatcactgggagtgggatttgagcatatatgtattgtaaaattctcaggtaatcctcaggtacagccaggcttgggaattactgttttagtatatttttagctaagatcagatacttcgctacatacaactcagtttctctttcatcttactatacatatacctgctttttgcaaaatggcatgaaatgtcggcataaacattttcctcagtatgccctacctcatccccacagcccactcatatttcctatcatactgtacaagggcttgttttatcttagaacctttgggcagccctggtggtgcggcggtttggcgctgcctgcagtccggggtgtgatcctggagaccctggattgagtcccacgttgggctccctgcaaggagcctgcttctccctctgcctgtgtctctgcctctctctctctctctgggtctctatgaataaataaataaataaataaaatcttaaaaaaaaaaaaaagaaccaccaccttttttgggagcactttaaagtgtacccattctgcctgatttctggagtctggcatcttgtgtgcctagcttggtctggttccatttaaaaagtaagtttttttgtgtgtgtgaaatataatacacatatagaaaatgcataaaatgtaaataaacatccatgtaaataccatcaggtcaagaaattgaacatacaccaggaccccttgtgttacaacccgtttccaaccactaacactttctccttttgtaaaggtaacctctattctgacctatttggtaatccgttctttatttatcattcttctcatattcagggttatggatgtttcctactttgatcaaataaggagatctctatttcttgttttcttgaaggggagagggatagaaatgcttttattcttccatctttggaagtagaggactattaaatttaaggaattagaaaatcaaatatatatttgaatccattaagtgacttattactctaatttttaaaatattttacaactgtataacattttatctttactgaacttcattttatttttatcattttttgagtttgggggatgtgtgtgtgtgttttaacagaggaagttagagatcatatagctaacacccagtggcagaaaacagataactgcctgactagcagttcagtgtatgataccctagtgcaagttgttaatgtggtttgatttatagttttgtcagtaaatgtgaaaatatgagataggaattttattttaatttttttatgataagaattttaaacttgcatttatttctcttttaaaaatatgtatttgggcagccccggtggctcagtggtttagagccaccttcagccctgggtgtgatcctggagacctgggatcgagtcccacatggggctccctgcatggagcctgcttctccctctgcctgtgtctctgcctctctttctcgctctctctctctgtttctcatgaataaataaagtctttaaataaaataagtttctcatgaagtctttaaataaataaaatatgtatttattagagagagagtgcatggcaagagtgttggggggtgggacaagcagactctgcactgagtgtggagcctgacgtggggctccattccacaaccttgagatcatgactttatatgaaaccaagagtcagccacttaacatactgagccacccaggtatccctaaactctttcaacagtatggcaccaaatttttcagtataaactaagaatacaaataatgtacacattaatcactgttttgggtacccaagaatttgaatgtatattcaagttaattaaatctttttcaggaatatgaagccatctatctagcaaaattaacaatacagatgatgtcaccactgcagatagaaaggtcgttatctgttcattctggacctacaggtaaggatttttgtattttagagagggttggggagaaggatgatggtatgaagggtagaaagcattttttgctctttataagttatactgaacaatctaaattatttagaaaacattgggtagacaatacacaatacacaatattaaacacaatataattgcaaattttaattttataatgaatccatgtgtattatattgagtttctgctgtgtgtataccattgtacctggttaatagaatatgctggctggaagatcaaacttctacttaagtctttacatagtataactgctataaagattaaaataataagagggatctggagaaggggctctaagtacactcaggtgatcttattaaaaataaaaataaaaggtgattaataaatgaaaggatttttcaggttaagtaggttgactactatgagctactccaatttttctcttgtaattagtatttcaatcccttctccttttcttccttatgcctgtcagagtactccttcccctattttcaaagttaatgatccaagcatgctttcaaaatcttttaacttgtgtcttcttttctaagaccttgctacctttatctatctctttttttactcagtctcattctatttcaggtcgatattggcctcccatccaaactctcacttggtctattctgtacattgtggccagatttatttttacaaaagatagttctgatgtatttttcctgtacaaaagccttcactggcttaaatccttcagaagaaaacctagagtgttaatagtaagtaaggtgcttctggatcttggtatctcccagtgttcctctttatataggcactccagaaagccaaactacttgatggtttcattttgtctcttttctcctcctagaatgcacattcagtctttctacccttaaaaacttagttcatgttatatctcctcaagagaaatgatgattaacttcatcttcctccaatccctagttattcggaactcctatagagctttatttatacctcctcactttctactttgcattagttatttatgcctcatacctcttttagaatgcaggtatagcactgcatctgaaatttagctatagcagccgtattatctgctgcaagccatcctttctcccagctctagacctgttggtaataaaaccacagctttcaatggaaaaattttcagcagtgtctatgaaagcaaaaaagataatctacaaaataaaattgtacaatgtaaaattaatgtcttatattttatgttctaagtcatagagtctggtgcctaaaggtaaccaaacatttaagtaccattatttcctttaaaattctattttaggggtgcctgggtgactcaattgattaaatgtctgcctttggctcaggtcatgatcccagtgtcctgggatggagtcccacattaggctccttgctctgtagggagtgtctgcttctcactttccctgccgctccctctttgtgggcttgcttgctctctgtcactcgatattgtcattttatataatctttaaaatatattttttttcaaactattttaaaaatgattattagtaatactaagacataattttagtaatacctaagacataattaattctcacgaggggaaatgtattctgtcatgaagatacaaagttgcttagtaatttatagcaaaaggatttgctgacgtttcctaaaaattcagtcttggaattctcatagtgcatatacatgataacactttatgaaaatgaaattttactagctctaacattctcacaaatgagttcccgttatattcatgcaataatttttaggcagtttgaagagaacacatgaagaagaagaggattttggaaacatgcaagtagcgactgcacagaatggctgactcaagagcaacattatagaggatgtgaatttctatttgggaaggagaaaatactagagacaataataatgtaaaatggtaaaaacacaagtctttttttttttttttttttttccaattacatgttgcttccaggtgtgtttctctgcaacttgttgagcaacattttaagaagatgttggacttctgcaatagatggcactggttttactcctttttttcttttcctttcctttcctttcctttcctttttcttttctttctttctttctttctttctttctttctttctttctttctttctttctttctttctttctttttacactttacagttttattataaacaagaattttggacttgcaaagaggtattattgcaataatgcacttttcatacttgaaatttatttgtatgatataaagttattactttaaacaaaatgcaagttaggggggatttgtttataaaatctgggtaatttataacaagaatttcctaaagtttgctaaaaattcattttgtgttctatatattacatttaaaaaataattttacagttgacttttatgatggaacctcttatggaaacattaacatgcaggaatctgccacatttttgttttagtataactcaatagcttcattacccttttatttttttaaatttcttaatccttattaatctttgaatcatgacattagctaactcttcttactttaacatccaagtattgcttccattcgtcttatcttcctaatttgttaattctatagaaaaaaaagtttaatgaacaaaggacgatgttttgcttggtaataccagatactcaaaaaacaaggagttttagactttcaagtgacttccttttttccttaaaagccaaatgttgtttgttcctttttagagttagttgtttagcccatttttcctttgtccaaaatagttctaagtagaatatattaactaatgtagcactatttttttttctaaatgaagcccaaaaaagaaaagtgccttgcatcaataaagaaaataaaaacaacaaaaaaacaaatcttcatgacctttaaattagtatgtagaacagtacaaagtttaaacacttttctgtaatttctttttctttttaattataaattagttaagacagagtctgaggcttaaagaaacctcagtaaattatttggaatatggaacatttactccttcattttatgttgttttaatgattctgtgaggttgttctggctcaggcagcagcttttctttgaagatgcatttattggggaaagtggtttgtgggaaacttcactgtatttagtgttttaattctttacattgagttaatccaaatatcccccataatttgcattaacaaagtcactttatggatccttaattctccatatttttatttatacatataacaattgttctaagaaaaacattttttctattttaagtatgccatgagggaggagaggagtgtttttaactttttatagttgatttagggtagcacaaacaaaactcctttatatctcacttttctcagtcctctcttgaggtgcttttttgacgggaatgatttacatacattcccttggtaccaataggtactatgcaaggtaacccattacaccaagttacttgctttgctttcctccctacaatgtaatataataccataagagcttttttcaatccagcatagcaggaaagtggaaattaaaattgagtccattcccattgacccagatggtattccttttctgattcccttcccttcccacattttactatcctgacaaaagcctattattaatcccattgtgatcctgtattctgttgtgtgattaggtcatttggtgtggtagtttagtacagtcaagatttgcattgtgttcagaaattccacttggcaaagtgccagataacacagctttcctgtatgtagatcactatataggtcagcaaagatctctcttgcaatctaataatctatgatactcctttattcagcagaaactctgcttaaaagaatcttcgttatagtacatttaggttttaaaatgagggagttaagatttttaaaattagtttcttaaagagacatatcctctctagtacttgggccaaaaatacagatttggtcattaatttaaagctggtaattttccactttttctaaccactgtaatttttatgttgtcactaaagtgcctgcccagcactgtatattaaagactgtctcttgaacactaggaaaagggactatcatcttcttgagtacagtactaatggggacaaaacatgaagtttattctttcatgtaagcaccccaagtttgttttaccctggatccatttttacacctaatgttcaactagttctagctcttccagtcttctatttggttccatttctggaattccgttatttctgtggatattttgtgatagttacctataatacaattaaccaatcatgatttattttctacaatatttgaataatgtatgagtatagcacccaattttaaatatgtaatctgggcaaggatttaaaacaaattgcagcaaaaacaggaaaactgctttactgtccactttaaaagtatgaagcaaatattgaaaatattcaaactggaatggcagtattcttaccttattcgtttgtgttaatttcatactcattgggtgtttaaacagcagttacgtttatttgtatctactctaaggtggaaatgttaaactgggatagcttctgctaccaactctcaactgtttgacttttagagcagaatatttgttttttgggggggggattttgtgcttcatctgagtttagaagtaatgtcagaaaatgttaagcatgtcctttttaagaaaatacaaggtttctaactgtcttattaccatggtaattcaagtgaattagaaatatttaactgcaatcttgaattataaagttggggtgcacatatatatatacttatatataaggatctcaacttgatgtaaagtaaatgagcagttacctggcggatttttattttttaataactggtttaatccataattccataacaaacttagcttcatttcagtatttactttctttgtccattcaacaatattccaatatggaagtgataggaaatagctgagaattactaaaagattttattttacttttattgattagaaggtttataggatctttgaatgctggattttttttgtcttacccatccatggcagctaaaaaaaaaaaatcaaaatattcaggtttacatgttagctctctcatagggagttgccatacctcacagttcaaagtgtattctatagatcagtaacattatactgacatgtaattgcaatttactatgcagcaaaaatgattcaagaaaaataatctacagtgtctatttacctttgtacaggcaattgcttaagttaactctgcttttaacatttgtacttggataaaatgcttatgtatgtataggaatgtcacagtgcaagatgctgctagcccaggcacaaagtattaaaattattttgtgaagactggtggttgtattaaaactgttgtgccattatacctcaaaaagattgaaatgctcatttgtactccttatgcctcagaattttggattattgtcttttaggtataagtaacccagttttactacctcagattaaggatgaatgaacactggaccttgagaagcacttaagagtatcttccaaaacacggtagtcacacacacaaaaattatggtcagtagtccaggcagggcctgaattttagctcaagaatatttctcaggattagttgagcagatttggagttaaaagtgagggaatttgtgtctgaaggaaagggtatataagtcatccacagagcagcttctagcccattaaaaaaaaaaaaaaaaaaaaacttgctttcacagtaccacgttctgttagcctacctacatattcttcatcaaatctaagatgctatctctgtaattttagatatgactaaaagggaaaatattgttgaataaaatggggcaagccatttatcataaaatgcatcctgagggactcctgggtggctcagtgttagagcgtctgccttcggccgagggtgtgattcccagggtcctggattgagtcacacattcacacattggggctccctgcatggagcctgcttttccctctgcctgtctctgcctctctctgcctctcttgtctctctcatgaataaataaataaaatcttttaaataaataaataaaatgcatcttgatttccaaaatgagagatccagatttccaaaatactagtgtaaaaaatgtgcatcctacaattatggaaatgtaaatatacaaaatatctgaggcataataaaaatcacaactgtcacttcattctaccttttcaaaagcaaagtaatgctttaaaatatgcatatatggtttacatgaaatgttttatgcagttttctgtactcaaggtttactcaatatggtttagaaaattttaaacatactctggctaactaaagctaaatatagatcaccattttgctcaaggacacaatttttatataatgtactttgtaactttcctataggaaggacttaagaccttaaggacactggttaaagtgatttatttaaatactaactttgtagataattttacttcaaattgttcagaagtaaggtaaagcattcaattttgcattctgttagggattattttttttaatatggatcttaattaccagaatgtacctaataaagctactgtctgtcatgctaaggttgtaggactcctgaaaaggcaaaactagcaggtttgttgctttcactagagacatcaattcatatgcataggtcattagcaggtaagtagtacactctcttggtgaagaagggtttttgttgttttagacagccaactttagcttactccaaggggagaaatcttttttttttttttttttttttttaattttttttttatttatttatgatagtcacacagagagagagagaggcagagacacaggcagagggagaagcaggctccatgcaccgggagcctgacgtgggattcgatcccgggtctccaggatcgcgccccgggccaaaggcaggcgccaaaccgctgcgccacccagggatccccaaggggagaaatcttaaatccagctgaggtaggtgtgagttagagggattaaaaagtggttgtctttaccttcccacttaatttacaaaaatcacacaaaactgaagtcacttatgaaccaggatgtgaccgaagactcaagaaaaacccagacatagagttttaaaacttcatcatatgaacaggtttaatgtaacatggaatgcaaaagattagaaccattaataaaatatccaattcttcaacttaaaaaaataattaaaataaataaaatcaaaataagatagtgaccagaataatagtaccatgacactcacagtaaatagaaaagcttccatcagcattttaaggagtaacaaatgcagtgatacatatttaaatattccactcaattttgttatttatttttcataaaaacattactcagaaggcttcagaaattgatgaaaagatgagaaatcaggttagaaatacataatatgccaagatttgttaattcactgttaaaaagtaccttatatttgctcattttaaacaataattatatttcacatataagacaggtagtaccttatctgcataagaattataaacttttagatgtacacttaaattgttttactttgaatcttgtcacattttatcattttcatttctactttaaaaggctgaccaggttgtttaccaatatatattaggatcaacaaatgctggactgtattacatttagttttatccaatttcatataatatatggaaaaatgatacactcaagtggtttctggtatttctttgaaacaaaaatactcattttatgaatgtgataacagccttattcatggtatgcttttttttaatgatcagtacagatagcagacacataactcttactacctatactgtaactacaaagaaatgaagccaaactttagaaaaatacaatgcaagaaaagattcaagttaaaaatatattcctttggttaaaaatcatcccctttataatactcatttgtaatctaagctcacagcatgtcccaccagcccaaagtaatcttctaaatgtcattatacttgttgtattacaatgttttttttttccgatccagtatttatggaggtcactgagttgcagcaacaaagtattttaactctagggagagtattgccttgttgcattagctccttttacaaatgtctttcttaaatgattttttactttagaaacctccgacacatgtagttttcttcagatactgtatatccgaactttttatagaaaccaacattttgtggtagacattcaagggtaatcttataacagttcagtttcttgcttagcaaagtaagggttgataataacctgaaattcaaaaatgggggagggagggaaagcatagagcatttgttaataaaagtgcatttgagtaataatatgaatgaagattatataaataaaacttcaaatttatattagagatttaaccatgacctttctcactatatttaaatattcaaattgtaagtgggtaagtatttaattcaccccaagcattttactgtttcaaatatactttacctagtaatctctagcccattatataatagaacaatactaaattcaccctaaaccctccttaatactagtttttttttttttttttatttatgatagtcacagagagagagagagagagagagagagagaggcagagacacagacagagggagaagcaggctccatgcaccaggagcccgacgtgggactcgatcccgggtctccaggatcgcgccctgggccaaaggcaggcgccaaaccgctgcgccacccagggatcccaatactagttttaagattaatgttaacaactaaagaaaaaaaaaaaaaaaaacctaaagactcaatctttttaaaaatatggccaaaatttaaatttttttttccctaaatctattcaaactactcaggaacagtcaacatttcccacgtgatttcccatgtgaaataaatagcttttgttatcattttaaagctaacgtttgtgaaaatatgtatcagattaactctggattgctctaattaatatgaaatacagcaaaaaagtatacattttccaaacccaatagaatgtgattttaggggctcctggctggggttaagtgtctgtcttcgcctcaggtcatgataccagggtcctgggatgggtgcccctccattccaccctgggctccctattcagtggggagtctcctcctcctgcccttccccctgctctcaaataagtaaagaaaatcttaaaaaaatggaatatgattctaactgccttagggagaaaaagaccagaaaagatctacaaaaatttatccagaagggtttctcatatttgcatagactgaaaagttgtgtatcattttgaagagagaacattttgactgaagttatgaaattataaaaggtatgataaaattaagtggactagaatactagaagctggtctggtctgttcattgatatatcctaaatacctagaatagtatctggcacatagcaagtactaaaaatttactgagtgaattcctaaaactcagaagagatggtactaaagcaagttctagcttataagataggcaataaacctatgagacatttattttaaaagatttagataaatgcacagaagattttaacaaagcctgtttcagtatgtttctaaaacttatgagacaaaaataaataaaacttaggagacagaacatctcctttgtttttaaacatgactgggaaactggggtgaatcacttgacctggccacaagtttttttcctactagtagaatactattattaaaagttcatttaaagggacgactgggtggctcagcggttaagcatctgccttcggctcagggcttgatcctggagtccccgatcaagtcccacatcaggctccctgaatggagcctgcttctccttctgcctatgtctctgcccgcccccccgtctttcatgaataaatcttttaaaaagttaatttaaaaaattttatggcgggatccctgggtggcgcagcggtttggcgcctgcctttggcccagggcgcgatcctggagacccgggatcgaatcccacgtcgggctcccggtgcatggagcctgcttctccctctgcctctgtctctgcctctctttctctctctgtgactatcataactaaataaaaattaaaaaaaaaataaaaaaaaaaattttatggtctacgaaacagtatacttctaatttctaaacttaatgataaaacataaaagtactttgttcattaaatttagcttaagctgctgagtgagcctaattgatgacatctaaaaagaatttcaaacaggaaaacattgacgaaagaacatattaactacaacagaaaaaatatctaaccttgtttctgcctacttacagtttgccaagctgctttcctctgcattcatcactaacaacaacatcttctactcttcctctctgaaaatgtttaacaatgtttaaaagacttaggcatgtagttttgtttttagctaaatcagcaagtgacaattcagtgatgttttatgaacaaactttaaaaaccaaaatgccttttttacttactataatgaatcaacttgtggcctaatcttgttttgtccatgtcttaaatctgcccaccccactgttttaaagatttcagaatccacatcaccaaaatgtaattttgtcatgttatactacaacatcttaactccttgcttaatagttttctttcaaacatctaaatacaattgattaatttctagtaaagaaaccccaccaaaattcatacctcacaatacattccaaatgttcctatctattttcactggattacctaggttctcatgtgagtcatgaggagtgaacgggcactagaaattagagaatacagttgacccttgaacaacatgggtttgaacagcacaggtgtgccacttatatgcagatttttttggataaatactctgtaaatattttcattatgatttaataacattttcttttctctagctttactataaaaatgccatacgtaatatatctaacatacaaaatgtgttaatgagctatttatgttattggtaacacttccagtaacagtaggctattagtagtttcaggagtcaagtaacatgcagatttttgattgcagataggtgggggggtatcagtgtccttaactcatgttggtcaagggttaatgatataatattctgaaccctttaactgcttggaaactgatggaaatttgtgttaatctatatatacagtattgtgttttttgaaaaatagcatcaggtattctaatcattactgccaaatacatgatgctgacttggtttctctaggattttaccaaatctgacaccttacaaaacaatttttagcaaacaattcagattattaatacattttcttccaacttccagaacacaatgggaaaatgttactaagtgatttctagtaagcaaagttttcagggcagtacagctcattttataatgaaatgcagtgagaaaatagattggtctaatggaaactcaaagttagttttgctagaaaacacctgttcattttagtcctaagcattaatgtgaacacataccttagcacaggaatggatgaatttatgttctattatcagagttgctgtagcaacaatttgtcctaaagtcacatcttccacaactgtaacataatagtccccggatttcttcatgtgctcaaaagattctgtggaaattggaaaagtgttatgtggtggacattaaactttagtaggtgccataaaaatgctaggattaactaataccattattgaatacttaaaagctacttcatcatggtaatttacactttgtttctaaagaaaatgtcagaaatgtccaagtggccaaaatatgagcaatcattatcacttggaatatggcccttacctttgaaaaacctgttagcaaagtacaactattaacagctatgtcagatgaatggcacttataatacaaataaattgtagatgttgccacttctgtgactaatgaattgaagactgtcttaatatcttcattactttaagtcattactttctttaacctttacaacactcagtatttgagtagaacaaaatgcaaattttaataagaatgtttacacggctccattctgtaacttttagtcttctggcttcaaaacattttgacaagtagttttcagttttctccttgtgacctgaagtggtttcatgactacctgacttgcttttttaaaaacagaatcctcagttttgcttgttttgaaagcaccttgtgaagtaggttgaaaattgtcttcatttctaggtaatcattccaaagtcccatgacaaatgcaaagatggaatactttactctcaaattgatttttagaacttatattgccaaataataggtttctccatctaatcagatatgcataaaaaagcctaatctcatatatagtttatttccatagtcttgttctagatagggttctggagtggaaagaagaaataaattcagtgaagaaaaacaatgaaaatcagaaaatgatgatcttcatcttgggaggctcaaatagagtacataacaaaattacctaatggaggaaatgaagatattatagcaaacaggaggacagtgttagagcactagatggaatcaggaaagttctattcctttccttaccaataactacctgtgatcttcagtcatttgacctctctggtttccattctctcatatggactaaaaaaaaggggctgaactatacattctgattcctatggatcttaaaatttaataaaaacaaactaaattcagaacataatctcttaccctatatttggtgatgaaatttccatgaataacctaaccacatgaaatatactacagtacagaacaatctctagagctgtcaccagctacagtaattatctaaaaagtcaggtgttttgtaaaacacggtaattattactcttggatcctataacaggttagccacattaaacatttaaataagaaaatggctaattgctatatgaataatttccagctatttgaagaaaaacacaagtagacactgaacatagccctaaatgaaaaaatcttgtttccctttatttttcattcaggaaaaggggctgtagtacttactcataaattgttcagggttgaccactccagtctctgtcagttggcctaataccttaaaaaaacctagtgtgaaaaacagatttcaaattatgagaagaccatataaaagattaaaagaaggaatgaatgtgtgaagctggtaggattgtgggcatttgtgttttcacaactttctgtaatcattttaaaaataatcattttattaaagattaagctgaaacccattattccttctgtaatcattacataaaacaaagaataataggttctaccaatgtttttggctgtatgagatttttggaatagcgccgaccttaatgattcaatatttaaaaaccagcaggtatatttttcaatgtgtaatttgcattaaatttggtgcaggaaatgccaagttttcccaaatacgtgctttgattttacttaaaagtgcaacaagactgtcattatgcccaagtatactattttaaaaataaaagcaatattgttgagacaagataaccgatttcattattgttaatgtgaacattttaaaactttgagaatcttaatttctacacactcaatatttagcttaccaaaattagtttctttagatttcctaccaaaaaggaaatgaaaaagttcattttttttttattataaaattttaaaaaatcattttggagaacttagacattaaaaatatatgtaaacaaaacctttgcaatgtatccaaggcaaattatctccactctcattccctattcagcttcttagagaagattcttccttatgtgtcattatagatgataatttcaccttcatgaagaaaagtcttttgggattcttaattagtgctgtatttaagccatatgaaatatttcagagtaatacttggacttagccatgatacatacatatattgggagttgagtgtctcagtcactttataaatgagcatgcaactcttgattctgaggtggtgaatttgagccccacactgtgtggagagtttacttcaaaataaaatcttttaaaaaatttaagtataaaaataattcaaaatgcaaatattttttaaacaacatatgtttctagagaaaatagaatgctaattacagctgacccttgaataacacaggtttgaactgtgcaggtccacttacagattttttttaataagtacattacggtaccgtaaattttatcttccttatgatttccttaatgacattttcttttctctagcttactttaaaaatacaatatataacacttataagatatgtgttagtcaaccatttcttattgataaggctttcagtgaacagtaggctattagtaagttaagtgtttggtgaatcaaaatttataaacagattttcaaatgcacaggggtcagtgcccctacctaccatgttgttcaagggccaactgtataattctaaccaggatttgtaaactgagtccctacctctatttaagtcagcagtacaaaggggcctcaaaaccaagccttctccaggatatgttggggaaatggctggagaaaatgtagctgtattctggctccagtccacttctttgagtagacttgggtcaaacataggagtttcatcaggtttcatctttgcagtaaggtctaaaatacaattttaaatggtaaggcatttttaatagggaattaggattgatgaaattacttaaaaattaacacatatgcaaggtattttattctatcctgaatctaacataaatgccacaaccacagataaatagaaaactcatggtgatcatcagaaaacaagtgactaaatttctaagttttaaactttaaaaccccattttctaccaagtgttttaaaacatttttcctggggtgcctatgtggctcagcaactgacttggtttctgctcaggtcatgatctcagggttgtgagatccagccagtgttggctccgcactaagcatggatggtgtctgctgaagattctctccttctctctctgaccttctccatactcacacatgtgcactctaaaataaaaaataaattcttaaaaaaataacacatttttcctatgggttggtactagcatagctctgtgaatagctgacttcccatgaacttttatgttttttcattattggattttattatttggctaagaaattatttgttggcagtcttaccactaagacttactgtgcatgttacttgtttttttatatggactatggaaagataattgatgaactggcttaaaatactctctacattaattgtaatatttggtttcagctatgacattcatattaaaggtatctgttggattttgttttcacaccaggattttccaaaaatctgtaatgtaactttctcagcggcatttaggcagcttaagaattgccagtctttcatgtgattataaaaggatcaattatagtattgtcttttttgaacatttagaaatggaagattcttactacctgtagtctaataaaaaagactaaataacagatataatagaaaaacaagttatataaagaataacaatgcgggcagcggaatgtctgtggaacacagagccactagaatggggtcttcctaagaactattaggagactgtaaagcaacctctcttatttctatccctttactcagttaaagaaactatttgatacttgcttccagaaacaaagaatttaagatacctatctataactaccaccaaacaaggaaacaggaaaaattaaagtccatttaacgatttttccaataaccctactcccattatgttccttatttcctaagtcacattatgcttaagggcaattgttattaactttttcttaaaggttgattaaactcctgcctgtggaacccaacataaccatacaagtaatgctgcaactgtagtagaggctttgggaaggtagtgtgatgtaattaagaagttaattagaagttaacattgttcagcacttctgatggaccagacattgttcaaaggactttacacattactaattcatttactttaacaatcttacaggatgagggtgattattctccattttaacaggcgaggaaatgcaggcaggacatgtaaagtaacctgcccaagatcacaaagtggagctagaatttaaatctaagatggaaaagagcatgagctctggagtcacactaatgttcaaatgtcaaatttgattatggctaatgtcagctctgataatgtttcatttgtaaaatggagatgaaattattaggacaaaatgaattattatatacagcacttaatagtgcctggcatactgcaaatgctcaacaagacatattttagttagcaactaattacaaattcatgtttgtaaatttttgatatttttcatctttacattaactcatgaatcaggcactgtagcaagggctacaaaaaggatgacaggttatctatatttttttttttaaggattttatttgtttattcatgagagacacacagagacagagagagagaggcagacacaggcagagggagaagcaggctccctgcaaggagcccgatatgggactcagatccccaatcccaggatcaagccctgagccacccaggcatccctgtttatgttatgttaaactgaaacattcttaggaaagaaagaataaaaaaaaaaatcatagtgtattatgtagaatccaaggggcttccccgccccccaaaaaggactcaaatatgttatgctataaactctatacctggttctaagaataataaggaaataaattgtgatgatcagcaatcaaatttaacaagcttacagtccacttgaaacatttttttataagttaactttaatgcatgcattttgccatctgtccctgataactgatccctgaagcttttaggtatacccatctgaaagatgggtaacaacactgtttttcaggtatacaaataaacaggctatttatttattaacaaggtaaaacatattaatttcagaagccagaaagtgttaaaaaacttaagtacctcagggtggcacactatttaaacagtttgatgatcattttatttatcatgtaggtataaccatgaagtttaaagaaagcgaaaagggaatttagatgaacattacaataatttaaagttaactagattactttttcctacgaagctgcctgagttcacaataaaatatagcctagaaaacacgcaaaataataattttgaagagaaaggggagaggaggtatacaggagaactaggattacgaagcatttaacgaatgaattttaaaacagtaaatactaatgttttcctgtgcttttctttagcctaatggtcctattccacgaatgatcataaaaataaataatactggctaaaatttatggagtgctttgtatttgttaacacataagaataaaatgaaatatcactattacctccattttacagaccaggaagcaggcaaggtaacttgctcaagataacaaagccaataaggaacaaagttaggattagaaccagacaacagagccagcttcaagggcactggacctgtgcagctgcccagggccccacacttggttctagtctatgttgccactgtcttgaaattctgcacaggttaccacagattatgcagccattcctgcatgactccagattctgtactctttgtactgaagatgaactagtgaagatgaattccctacttcattgtataagataaaaatttaatcaaacgcaacacttataaactgtatttgaaaaataagagtatcagacatgtcaaaatacaataaagcattctaaatagaaataagaatccattactcaggtcatcagaaataacaaaatgttattttattttaagtatggctattttataaaacaaagctatacttaaagtttccttcatcttactccacccccagttagtaaaattctgctggtgcccaattaatatgctgggaaagttaaaataggatgtgatttgacaccaaattttgaaagattttagaaaggaatgaaatagataaatttggtttacaaaagaaatattttaggggatccctggatggctcagcggtttggggcctgctttcaggccagggagtgatcctggagacccggattgagtcccgtgtcaggctccctgcgtggagcctgcttcttcctctgcccgtgtcgtgtctctgcctctctctctgtctctcatgaataaataaaatattttttaaaaataaataataatttagcatcttaaggtaccccaaggtactgcaaaactaggaaatttcagtaaatagaactgcagtggtttgagggggaatctcatcattatcactggggtgaccgattttaaaaaagtaagcccttaacctccctaaatatttctccagaacttttccaatttaactgccaagtttgtgtgcatttacaaggcccatatatgcctaacaacccaataaatgcctggtgaatgaatagcaaatggcaagagacttacttgaaggtcacatttcaaaaaactcaaaagaaggattcccaaattgccacaagtgatatgacaaaaatcatccaccaaactcatttttactaggatcatcaggttttcattcatttgactactctctggacacaatttctacaatctggtttcccagtttctacagcacacaaaaatacaaatagggaggaggtgctgctggaagcaagtaactaggagcaacaagttggacactgggaatgaaaaattttaaagtcgatacaaaaattttaaaagcataatccaaggcccaatgtaaactgctttacatacctcaaggccatcgctatgttacttcagtacacggtgaacggggaaaggttctctgagactttaggtcttgtctatatgcatttcataaccatttcaataataatttggctacattttttatctgaaggccaaacactctttattcgctgatgattttaggaggcctggccatttttatgaaaccgtgcaatttatacttcacttgagaattttacaaagttattttctgatcgttaatttgacccctataatctggcattattcccagactaccgattaggaaactggagcatgtggagccccaaggtaacactgcaaatgagtgaactgagcctagaatcctatcttgttttcctaccctgagccctaaaataccatactcaatacacgccaatctttacatcatcgcaccagacaggttaataagtctcattttgaagaaaaaaaaaaaaaaaaaaagtcagcgaattctgcctaaataggactgatctcaatgatttcttgagatccattctaagatttgctcaccactgtatataacctaacaaaactaatcccataatccaccctcccccctcccccccccccccccgtttcaacgttgtaggaaatgttaagacttcggtttacgtaaacatcagcacctcttgtaaggggaaatcctagcgcccagtgcgtccaggggtacgagccccgggaaaagagacaaaggatggcctcctccccgcacggaaagccccaaccagtcagggcagggtgtgctcctccgagcaggagcgtgtcctcaagcggctcccgaccgccgtggggtgcagctcggaaagggacgggggagggggagggggtcggggcactcgtgcccgttcaaaaccgatggcggcagagagactgtgggcaagcgtctcgatcccccgggccagagcctgccgagccgagagttcgactcccggccctgctccggcctgccagggccagccccgcgcggctggaccacccgccctcatcccgaaccgcgctcggctccaggcgcgcgtccgctcaacttgctcccaaccgcgctccacaaccacaagtgcccccacctggccaagctaaacgcacacctcgccccgggcccacctccctcgccccgcccgggcagcggtcccagtcacacctgtttggtaaccgtgaaggcaggccccccaggcccccaggtcacccggcgcggccccgctctcgctccccggccctcagcctccctcacccgtgggggcctcgcgctcggcgctcctctccaggcccgtcggactctctcccacccggcgacgcggtaccggatccggatccggcttcagcgccagccccacctcctcctccacctcccgagccacggttgccgtgcggccgccgctgcgcgagccgcgaccaggacgtggcagcgccaacgcctccgcctccgcctccgcctcagcccggccgcttacgcaggggcgctcggggggcggggcctgcggcggctccggcacgtggcgcggcgaggacggcctccccgggctccgcctcccggcggcgtgggggtcgcgccccggctggctccccgcgcgcggccctggcggcggcgtccggctctgggcctcgggggagggcgctctgcccagccgtcggccacgctctgtaagtggtcaccgcgtgggcctctttcattttcggaagccggcggtgcggcttcttgccctccttggggccccttccttcaatagcccgtttaactaggacttcggcgactggctggcagctgagtcacctcatgaagtggggccgtgacgctcctttcagatcctttttggatgaaccgtagggttgagacactggttctcagctgtggcggtttttgcctcccagaagaccattggcaatgtcgggagctttttcagcctccctgtctgtgggagacgtgtcactagcatctctccagatgacagagggtacaggtgggtagagaccaggtatgctgttcaccgtctccaagtacacaggacagggccccaggaggcctttccagccgggggggaaatgtcagttctgctgagacggagaaacaccggggggggggggggggggttaggacacggaaaaaaaaaaatgactttttctcccacctcccgtttccaaaacatgtgtcctcattttacagattaggacaccggagttcagagatgttaaagtaatgtaccaacgtcacacagctagctagtagctcccattcgctggggtataccataaatttcaactttctgaaattgcaaagtgttttattcttaaacaatactgttcaatgaacaccatatatagtcttgccgggagttttattttctgcttctttgtgaaacttaaattccggttaacacttttacaggttcgtgcattctcaccaccttcaaacatcagtgaggctgatggcatccagttttctgtatccgttcttctttttagccttttgcatgggaaagaatgtataagctataaaaaaagaaagaaacgccacaaatattaagaaacattatagccttgtttccttatcacactctggccctacgttttcagtgagttttctcggagtaacagaatcctgtaaatgttgtaattcagcaaaaaatgaagcagttataaaatgtatcacagagcacagttctaagaggtaaattttataatttagcaaaaactgaagcagtcaattataaaatttatcacagagcacagttctaagaggtaccaccaaaatgcaggtacctactgcatttcagatatattccttccttttcccttttgtgccagaggaacacaatttctccttaatagtcactagccagtacagtgagtgtcctccttctttgcctgttggtttacttgcagtgaggaaccaagcatagccagatgacaatctcaaagtctagtttaatggaatcattaatgtgttctctagtcatttttatttagttttttattgagatataattcacatgtaacagtgtattagttttagatgtataacatcatgatttgatgtacttacgtattgcaaaatgattacttcagtaagtttaggtaacatgcctcaccacacatacttacaaatttttttctcttgtgatgagaacttttaacatttattctctttgaggctttttttttttttttaagattttgttatttattatagagagacagaaatagcgacagagagcatgaacagagtagagagggagaagcaaggagcctgatacagggctcaatcccaggaccctgggatcatgacctgaacagaaggcaaatgcttaaccagttgaaccatccagatgcttctctctttgcaactttcaaatatacaatacagtattattacttatagtcaccatgcctacattacatcttcaggactaatttaactcataactggaactttgtgcctttcgactccttcactgattttgttccccaccccccacctctggcaaccactaatttgttctctttatgaatttgttcttgtttttagattcaacttataagtgagatcatagagtatttgtctttctctctacagtaagttcacttactgtagtgtactaaagctccatccaagttgttgtaaatgacaggatttcctttttaatggctgaataatatgccaccatgtgtgtacctacatatatataaacacaaacttctttatccactcatctaagaatagatacttaagttgtttccatgtcttatctatttattaataatgctgctatgaacatgtggatatgtatatcttttctggatggcagtttaatttgctttggatagataacagaagtggaattgctagaccatatgatagtttctgttttaaaatttttgaggaacatgtttttgtttggtgctgtttagaacagtttttttaagttttaattttaattccagttagttaacatacagtgtttatatttcaggtgtacaatttagtgattcagtaattctatacattgctaagtgctcatcataataagtgtcataataagtctcatcataataaccccccccactcacctcccttctggtaactatcagtttattctctatagttaagagtttgctttttggtttgtctctctctcttttctttccttttgcttacttgttttgtttctcaaaatcatatagtatttgtctttctctgacttattttgcttagcataatactctagctccatccatgttgttacaaatggcaggatttcatgacttttttatggctgaatattcatatatataaatatatatgaatgtatataccatatatatatgaatatatattcatatatattccacaccctctctatccattcatccatggatggacactttagctggtaccatatcttagctattttaaataatgttgcgatgaacatgtgggggcatatatcttttttgaatcagtgtttttctattctttgtgtaaatacccagtagtgtgattgctggatcataggatagttgtatttttaattctttgaggaaccttcacactgtttcccacagtggctgcaccagtttgcattcctaccaacagtgcagaaggtttcctttttctctacatccttgctaacacctgttgttttgtgttgttcatttcagccattctgacatgtgaggtaatatctcttgtagttttgatttgcatttccctaatggttagatgttgatgaacatcttttcatgtgaaagttggccatctatatatcttctttggaaaaatgtctgttcatgtcttctacccatttttaaattgggctgtttgttttttgggtattgaattgtgtaagttctttatatatatttaggtaccagccctttatcagatatgtcacttgcagatatcttctcctactctgaaggttgccttttaggggtttttttgttttgtttgtttgcctttagttttgttgactgtttccttcactgtgcagaagctttttattttaatgtagtcccaatggtttatttttatttttgtttctgttgtctcagggaacctatctagaaaaacgtttgtacagccagtgtcaaagatgttactgcctgtgttctcctttagggttcttatggtttcaggtctcacatttaggtctttaatccatttggaatttatttttgcatatgatgtaagaaagtggtccaatttcattctttcttatgaagctgtccagttttcctaacaccttttgttgaagagaatgtctttttcccattggatattcttttctgctttgtcagaaattaattgaccatgtaattgtgggtttatttctgagttttctgttctgttctattcatctatatttctatttttatgtcagtaccatactgttttgattacatagttttgtaatattacttgatgtccaaaattgtgatgcctcaggccttgctttagttttcaaaattgctttgggtattcagggtcttttatggttccatacaaattttaggattgttttagttctataaaaaatgctcttcatattttgagagaagttgcattaaatgtgtagattgtttttgggtagtatagacattttaacagtattcttccaatccataagcttggaatgtcttcccatttctttgtgttgtcttcatttctttcatcagtcttttatggttttcagagtacaggtatttcctctttggttacatttattcctagatatcttattatttttgatgcaattataaatgggtttgttttcataatttccctttcttctggttcattattgttatatagaaatataagagacttctgtacattgattttgtatcctgccactactgaattcatttatcagttctagcagttctttggtggagtcttgagttttttatatattatatcatgtcatctgcaaatagtgaaagttttgcttcttccttaccaatttggatacctttcatttttttgttgttgtctgattgctgtggctaggatttccagtactatattgaataaaaatggtgagagtggacatccctgtcttgttcctgatcttaggggaaatgctctcaatttttccccattgaggatgatgttagctgtgggtttttcataaatggcctttattatattggaaatatgttctctctaaacctcctttgttgagggtttttatcatgaatggatgttatacattgtcagatgctttatctgcatctattgaaatgatcatatgatttttatcttttctcttattgatgtaataatgtatcacattgattgatgtgcaaatattgaaccacccttgcaacctagaaataaatcttacttgattgtggtgaaagactttttaaaatatattgttggatttggtttggtggcattttgtcgaacatttttacatctatgttcatcagagaattagcctatagttcactctctctctctttttttttttttttttttgtgtgtgtgtgtgtgtgtgtgtggtgtctttatctggttttagaatcagggttatgttgatctcatagatgaatttggaacttttcgttccttttctattttttgtaatagtttgagaagaatatgtattaactcttctttaaatgtttggtaaaactcacctgtgaagcaattggacttttgtttgttgggagttttttgattagtgattcaatttctttttttttttaaatatttttttaaagattgtactcatttattcatgagagacacagagagagagtcagacacaggcagagggagaagcagcctccctgcggggaccaacatgggactcaaaccaggaccccggaatcactccctgagctgaaggcagaagctcaactgctgagtcactcaggtgtccctggtgattcagtttctttactggtaaagaattttctttaaaattctttaaagaatttgatctgttcaaattttctatttcttcctgattctgtttgggaggttatatgtttctaggaatttctaggttgtccagtttgttggcatatagttttttataatattttcttttaattgtttttatttctgtggtgttatttctcttctcttatctgattttatttattttagtcatttgtctctttatcttgataggtctgggtagaggtttatcaattttattgattttttttaaaagatttatttattttagagaaagacagcaaggaagcataaggaagagggggagagggagagagaaggtcaagcaactccacgctgagtgtggagcccaacacagggcttgatcccacgaccccaagatcactacctgagctgaaaccaagagtcagacacctaaccaactgtaccagatgcccctttattgattttttttaagagccagtttctggtttcattgatctgtcctattgtttttttagtttctatattattttctattccttactgtttccttcattctgctggctttaggttttgtttgttgttctttttagctcctttatgtgtaaagttaggttgcttgagaattttcctgattctggaagtagacctgtattgctataaacttccctcagaattgctttcactgcatcccaagggttttgacccattgtattttctttttaatttgtttccatgtacttttaaatttcttcttttatttttggttgacccattcattgtttagtagcattttatttaacctccatgtatttgtggtcttccagatattttcttgtggttgacttctagccattgtggtcaaaaaacatgcatgatatgacttaaatcttgaatttgtggaggcttcttttttgtgagctaatatgtgatctattctggagagtgttccatgtggacttgaaaagaatgtgtaggggtacctggatggctcagttggttatgtggctgactcttgatttcggctcaggtcaaaatcaagatcagattttgatctcaggatcgtggtattgagccctgcactgggttccacgctcactacaaagtcagcttgagaatgtctctctctccctccttctttgcccctccctcttgtgttttctttttagggatgcctggatggctcaggacatgatcccagggtccaaggatcgagtcccacatcaggctccctacacggagcctgtctatgtctctgcctctctctgtgtctctcatgaataaataaaatcttaaaaaaataaatctttaaaggaaagaaaataatgtgtattcttatttagtatgggatgttctgaatacaccttaacagatgtattctatctggtccagtgtgtcattcaaaaccattgtttccttgttgatgttctgtttagatgatctcttgattagttcctttatgtttgttattaactgttttatgtatttgggtattcctgtattgggtatataaatacttaacaattgttgtaccttctggctggattgtcatctttattattatatagtgtacttctttgtctattgttgtagtctttgtcttatttatttatttattttaaagattttatttatttattcatgagagacccagagagagaagcaagctgcatgcagagagccccatgcgggactcgatcctgggactccaggatcatgccctgggccaaaggcagatactgaaccgttgagccacccaggtgtccctgtagtctttgttttaaagtctagtttctccaatataagtattgctacacttttttttaaagattttatttctttattcttgagagacacagagagagagagagagagagagaggcagagaggcagagacataagcagagagagaaaccagatccatgtagggagcccaatgtgggacttgatctcaggactccaggatcatgcgttgggccaaaagcaggcgctaaaccgctgagctacccagggatcccctgtctttcttttgatatccatttgcatgatagatgtttctccatcccctcactttcaatctacacgtgtctttaggtctaaaataagtcttgtaggcagcatataggtgggtcttgttttatccatctgttaccctatgttttttgattggagcatgtagtccatttatattcaaagtaatcattgatagatatgtatttattgccactttattacttgttgcgtggttatttctgaagattttctctgatcctttcttgtctttctctttcatggtctgctgcttttctttagtgataggtttggatttctttctctttattctttacaacttattagtggtttttgatatatggttactttaggcttgtatataactcttctccatatagcagtctatattaagttgatggttatttaagttttttttaaagattttatttatttattcatggcagacacacagagagagaggcagagacacaggcaaagggagaagcaggctccatgcaggaagcccgatgtgggactcgatcccaggtctccagcatcacaccagggcggaaggcggcgccaaaccactgggccaccgggactgcccaatggttatttaagtttgaactcattctttatttctctccatgtcttaggtatatggtatcatattttacatctttttattttgtgagttcctgatattttacaaaaatacttatttttactgcttttatgtttgctatcttcacactgttacttttgttctttcctttccactggaagagtcccctttaatatttgttccagggcttgtttagtggtcataaactccttagtttttgttcgtctaagaaattatctctcttcctattctgaatgatagccttgctggaaatagtatacatggctgcaggtttttttgtgttttgtttgtttgtttgttttcccagcactttgagtatataatgctactctcttgtggcttggaaaatgtcttctgaaaaatctgatagctttctggcgtttcccttgtatgtaactgtctcttttgtctttctagctttaatattttttatcactacattttccattttaattgtaatatatcttgcttttgttgattatgttgagagttctatgtgcctcttggatctcgatatctatttccttctccaggttagggccatcagttttcagctattttcaaataaatttcccccctccctttttctctctctccttctgggactcttataatgtgaatgttattatgttggtagagatactgagttccctaattctttttttttttatattttatttatttattcatgagagacacagagagaggcagagacataggcagagggagaatcagactcctcaaggggagcccaatgtgggactcaatcccaggaccccaggaccccaggaccacgtcctgagctaaaggcaagttgctcaaccattgagccacccaggcatcctgagttccctaattcttttcttgttttgcataattttttttctttcttttgttcagcttgattgctttccattactcaattttctaggtcatttctaggctattaatttgttcttctgtatctttcatcctgctgttcatcctatcaagcatgtttctcaactcatttattgagcctttgtttctgctttgttattctttattctgtgataagagtctcagacatgtcttcattccttttctcaagtccagtaagtatccttatgatcattgcttcaaattctccatcaggcatgttacttatatctgtttcatttagatctctggctgtggccttgtcctgttctttcatttgggacaaattcctctgtcttaatcggtttgtctaagtctctgggcctacttctgtgtgttaggaaagtcaggtacttctattcttaagggtaatggccttatgaaaaattgaccctgtagtgccctgccatgtggtgtcctctgttccccagggcctggtacttctgagaatgtctttaatatgtgctttgtgggctcttctattgtatcctggccattttttttccttaaggttagtcgtctgcagaggctgtctgcctgttgtggtcagtggttggtccctggcctgaatgtggtgttttaactgggtgtgctcttgtctgcttgtgaactgagaccagctgccagaactgagaccctggaaaccagattggaagacagggtgtggctggagtttgagccaatcttctgggcaagggggtccaccttgctgtgcctgaggtaaacatgtctgagaagggtgattccaccagagcttggggggatggggcttggtatagcaagataggtaatgagtattggtgctctcttggttcccacagatggccctgtgcttatgctgagggatgagagggaaatggcacctgccatgtcctttgctcccagaagggtctctccatgactgttgcctcttgaagaagagcaaataacctcccctctatgtaccctaggaactcttcagattactgtttccatgctgtatgtcacaggttgttttccctgccttgtctctaagagcagccccaatatcttagggctctcctagagccaacttgcagacctttaaaactttaggccttaactaccactgattgcaagaactcacaagattcagccccgctcacttcccaaaccaattgctatggggaattatctttcccgtgcactcccctgtattctagtctgtctcttacccttctccacaatggtttgcttcatttctgtgaaaaatgctgttagaattttgatagggattgcattgaatctgtagattactttgggtgaatagacattccaacagtattaattcttccagtccatgggcatggagtatctttccatttatttgtgacttcttcaatttatttcatcagtgtcttatagtttccagtgtataggtctttcacctccttggttaaatatattcctaggcattttattcttttgaagcaattttaagtgaagctgtatttttaatttctctttcaggtagtttattattagtgtatagaaacacaattgactttgggtattaattttgtatgctacaactttactgaatttgtttattctgatagtttttttggtgaagtttttagggtttttctatatatagtatcatgtcatctgcatatagagacagtctacttcttttctgatttggatgcactttatctatcttgcataaatgctttagctaggacagctattactattaaattaaattaaattaaattaaattaaattaaattaaattaaattatttgagagagagaaggaaagcacaaatggggaaggaatagagggagagggagtgagggcggagcctgatgcagggctcaacctcatgaccctgagattatgacccaagccaaaaccaggagatggacagtcaaccaactgagccacccaggtgccctctcccagtactattttagatgaaagtgatgttgccttttgtcaaatcctttttctgaatctattaagatgattagatgatttttatccttaactttgttaatgttctatatcatcttgattgatggtgaaacatccttgcatcccaggaataaaacccacttcccagtctatgaaccttttaatgtattgtttaattcgatttgctaatattttgttgaagagttttgcatctatgttcatcaggaaattgacctataatttccttttcttgtaatgcctttatttcgttttgatatttaatactggcttcataagatgagtttggaagtatttccatctctttacttttttttttttttttttaagattttatttatttattcatgatagtcacacagagggagacagagaggcagagacacaggcagagggagaagcaggctccatgcaccgggagcccgacgtgggattcgatcccgggtctccaggatcgtgccccgggccaaaggcaggtgccaaaccgctgcgccacccagggatccccatctctttacttttttggaagtgtttgagaaggattggtattaattctttaaacatttggtagaattcaccaggggagccatctggactttgttggatgttactgattcagtttccttactggtaattagtcttcagattttctattaattcataattcagtttttacagattgtatgtttgtaggaatgtatccattttttttctgtattatctagtttgctggcatagatcatagtagtcttttatgattgtatttctgttgtattagttgtaatgtctctttcatttctgatttttttgagttttctctcttttattttccttggtgagtctagctaaatgtttatttttttgaaacccagcttttggtttcattgatcttttctattgtctttttagtctctgcttcatttgtttctactctgatatttgttatttccttccttctactaagttggtcttaatttgttctttttctagttcctgaagatgtaaaattaggttgtttatttgaggtttttcttattcttttattgttgtttctttgtttttgttttgtttttaattggttacacaaagaaaactttatttgcagcaaataaggagatcatggggaatggttcaaagccttgactcagcgtgttttttatttcttagtgtaggttttatcactgtcaccttccctcttagaactatttttgctgcatcccataaattctggtatgttatattcccattttcatttgtctcaagatttgagttctatttttatttcttctttgacctgttttttgttagcatgttgtttaaactccatgtatttgtcaattttccagtttttttcttgtaattgttctctagtttcataccattgtgattggaaaaaaaatgcttgatatgattttgatcttcttaaatttttatttttttttagagagagactgtgcacttgattcgaggtggggaagttgcagagggagagaatctaagccagtgctaagcatggagcccaacacagaacttgatctcacaaccctgagatcgtgacctgagctgaaataagagtcagatgcttaaccaactgagtcacccaggcacacttcagtcgtcttaaatttattaagacttattttgtggcctaacatgtgacctatcctggagattgttccatatgtgctggagaaaaatgtgtattcttctgcttttggatggaatgttctgtaaatatctgttaagtccatctggcttaacatgttaagtctaatgtttctttattgattttctgtctggatgatctatccaatgatgacaatgaagtattactactattattatattgctgtctacttctccctttaggtctattaatgtttgctttgtatatttagttgcttctaggttgagtatatgtgaatttacaaatgttatattatcttattgaattgacctctttatcattatataatgaacttctttgtctcttgttacaagtttgtcttaaagtcttttttttcttatataagtatagctatttcagctttcctttggtttccatttgcataaactatcttttcacatcccttccctttagtctgtgtgtgtccttaaagttgaagtgagtcccttataggtagcatatggttaggccatatattaaaaaaaaaaaaaaaaaaaaaaaaatatgttcagccactttgtgtcttttgattggagaatttagtctatttacattttcttaaagatgtctttattttagagagaaagcatgatggaggggcaaagtgaaaagggagagaaaatattaaatgggctccttagcaatcaatctttttttttttttaagattttatttatttattcatgagacacacagagagagaggcagaaatgtaggcagagggagaagcaggctccatgcagggagcccaatgcagtattcaatcccaggaccccaggatcaagccctgagcccaagacagatacccaactgctgagccacccaggcgtcccaatcaatcaatctttaaaaaaaataatatacatcttttatctgtgtgtccattagcaaattattgtagttatagctatttttactacttttgtcttttaaccttcatactagatctataagtgattaacctaccactattacatttgattattctgaatttaactatatatttacctttaccagtgaaatttatactgtcatgttttcctgttattaattagcctcctttcatttcagcttaaagaaattcctttaacgtttcttgtaagttcaatatagtggtgctgaactccagcttttgcttgtctgaataactctttatctttccttcacttttgaaggatagttttgccaggtagagtatttttggttgacagatttttttctttcagctcagtgaatatatcatgatattcctttctgacctacaaggtttgtgttgaaaaaacttgtagtctttttaaaaaaagatttatttattttaggagagagagagagtgtgtgtgtgtgtgtgcatgagggagaggggcaaaaggaaagggagggagaatctcaagcagactctgtgctgagtgtggaactgaatgaagggcttgatcttacaaccttgagatcatgacctgaactgaaaccaagagtcagatgcttaactgagtgtaccacccagatgccccttgttgataggcttatgggggtttccttatacatagcaagttgtctttctcttgcttttcttattctttccttgtctttgacttttgataattatagtttatgttggtatggatctctttggattcctcttctttagaacttcctggatctgaatgtctgtttccttcctcaggttggggaagttgtcaactattatttcttttaaaaaattttctgcccctttctctctttcttctccttttgggacccctatagtgtatatatcaggcctcttgacgttgtcccaatagtcccttaagctatctttattctttttcatttttttttctttttgaacctcttattggatgaaatctgctctgttttagagtttgccgatttttcttccatttcatctgctagaaaaaccttctattgagtttttagttcaattatggaattctttagccctgtgatttgtttggtactttgttatattttctatctctttgatgaaattctcattttgttcatgcattgttctcctggcctcagcaaccatctttatgaccattattttgaactttttgtcaggtgaatcacttatctctagttcattaaggtatttttatgagattttatcttgttcttttgtttggaacatgttcctccattcagttttcttagctttcttggtttgcattagatgaaacaaccacctttctcagtcttgaaggggtgaaccttattattcagtcctgagctcctcatggttttcttccaacctttgtgattgtccatgtggccttttatgttcttaatggttcccagtagttgagggtatgccagtattagtcagtgtcccaaaggggaggatttcagcactaaatgcagactaattagaagcaagacccttagggaactttttcttttcctttcttttaaaaaatttttcagggcagccccggtggctcagcggtttagtgacaccttcagcccagggtgtgatcctggggacccgggatcaagtcccatgtcaggctccctgcatggagcctgcttctccctctgcctgtgtctctgcctctgtgtgtgtgtgtgtgtgtgtgtgttttatgaataagtagattaaaaatcttaaaaaaaatttttttcattctgatctcagatcaagtgtataaaccctcacagttataaaagtctgtagtaaaactttttagtaattgatcagaactgatcagtctttcatacacacacatcaccccccaccttatctcattcatccatcaacaagttctcaattatacactatcaccttataaacgcatgcatgcacattcctaactctagacataagcccttattgttttaaattacttttacttcttagaattataaagatcatgcattagacatactggaaggcctctgatgctcagattaggatattttcatcattgatccacttccttttaaagaatgtaaatatacttccttcaccggcagactaggagatgtttatttctgtctgctccctctgcacgtcaaaccctggggcgataggccgttaagaactatttctttatttgctaccatcctactgaatacatgaatacaagccccagtggccactagtgcccagttatcaagagatgtgtcttttgggtggcagtcacaaaaaccaaggtggcagacatgtgcataagctcctttctcaaaaacattggcagtctggagtggggcagaggggagagcacagtgatggtgcctgttggccttactggtttctggagaggatggcaattggtccctggatggttgttaaaatagaagcttggccctcacctcagctattaagataataagctaataggcaaaaaagaaagaaaaaagataagctaataggcctctttcacaaaaagactacatgtttcaatctgctatttctgcagtgttcagtggagggatgtctggttaagaactgtttctctgtttgttacagtgctatggtacccacaaacataagccccattatggggctccctctgggcagcagctacaaaaactggggcatcagacatgtggacgagctcctttctgggagactgatggcctgagggagaacaggaagatgcacataccagcctccaatgtctggatagtattaaattagacacctgcccccaaggcttttaaggtaagcaaatagtttctttcatgcaaagactgggtttgtttcagtctgctgcctctatgctgggccttgggggataaaccatggagagtccacagaaaccctttatgaactattagttcattatagactatggacctcataggtgcaaatcccattggctttcaaaggtagatgctttgggagtccatttttcaggtggaagtcttcagagttgtggtaccagctgtggggttcatacctttcactcctcagagagaagctctgagttgtgagttccctgtgccagggttgaggtggatggtgagattgtatgtgaggctgtcctactcacttcagtgtgagtttttctcctttgcttgatgtgtaagagtcactcagctagtttctagatgtctctcagagggaattgttctgtatatagctgaatattagaataataataatctaatcaaagtacatttatggtacttactatcatagataacaacatatgtcttgttgttttgaccttcaaaggtggctcattttcacctggatactgtgccttcatattgtatacttgtctctagctactgctaggttgtcagggtcttgcttccaagcaaaaaaaacccaactgtagagggttgatcattagtttacagaatcagtgaggaggctggagaaccaacaggctcagaaaataagagaagccaagagggtctaggcaacccagaacagctagctgcccagagtctggggcaaccagcattttggtttttaagtttcctcctgtcaagagttataccttgcttgggcagcccaggtggctcagtggtttagcgccaccttcagcccaggacatgatcctgaagacccaggatcgagtcccacgtcaggctccctgcatggagcctgcttctccctctgcctgtgtctcttcctctctctctttctctctctctctctctctgttgtcatgaataaataaattaaatcttaaaaaaaaaaaagttatacattgctgaattcccaaattcagatcctgggcagccagaaaaagtacatttacaattgattattatgtattatgccatatgtattttgtttaaataggattgaatagaacattttttatggattttatttatttattcatgagagacagagagagagggagaagcaggctccatgcaggaagccctatgcaggactcaatcctgggactccagaatcacgccctgagccaaaagcagatgctcaaccgctgagccacccagacatcccaagaacatttaaaatgtgcatttaataaggccattttagccataaggaattgttttgttattattacttttattttaaagagtgctattaagtactagaaaatctgaaaaatatttccagaactacaatgttcatcctgttgtgggcatggccgttttattaattccttccttgctgtaagtgaaaatatacagaggtattccccttactcccagcccccactccaaaactaaaccaaattaattgtgaaatatggtatgattcaccttattttctggaattcacctataaaaatcaggtattggctatgggtggcagagtcatttttaggcattccttgattattccattctccagtgtcatttgacttccatctctaaatttagtctttaagtatccaacatagagcttatctacatatttgttatttattgcttactgcaaaggaatgaatgattattttaagatttgtaacattatggaaacaaagaacaaagaatgatcactccccataatcctgccctcagagataactactattaacagtttggtagttcttaatctagactgtctggtttccattttcagcttttccgtttagctggctaccctgaacaagttattggtcctcacactgcctgagtttcctcatttcagagtaatagtaatagtttactggttcacaaggctgagagagggtttaataagataaagcattcagcagagttactgatatataataagtttcataaatgctagtttgcatacatatgttagtcaagatagactagattatattggaataacaaaaaatccacccaaatatcagttgcttaacacaacaaaaatttacttcttgctaatgctgcatatcttattgcagattggcagggcgttttctccatgcagtcactcaggggcccagggtaatggaagttctatcatgttgtggtcacactctgcaatgcatggtacttttagtcatcacagcaacaaaaagactataaatcacacatcggttttttttactgcctcagcccataattgacatactaaatttcagcacttacaatttgctagtcagaactggtaatcatagccctgctctgctacaagtaagctgtagacatatggaatgtgaagtgcagaatatttggtgaatgctactacctctttcaagtccacctttcctgccacccagtaatgtagattatccaaattgtgttgtagtttttatgttttttttttaatttaatgtatcatggacatttccccatatcagtacatattaattcattcattgaccatttatttatttttaaaaagattttatttatttatttgtgagagaaagtatgagagagagagagaatgagcaggcatgagtaggggagggggcagagggagaagtaaactccctgctaagaagggatcctgatgtagtgcttgatcccaggatcctgagatcatgacctgagttaaaggcaggcacccaacaactgagccacccaggctcccctcactgaccatttagtaagcctttctatgcatcaggcctattctaaatactgggctataacaatgaagataacatttgataatccctgtcttcatgtaatttattgggttgcaaacaggtaagaaataaaatatttttttgaagtataatgtgttagggcagccccggtggcacagcggtttagcgccgcctgcagcccacggcgtgatcctggagaccctgaatcaagtccgtcgggctctctgcatggtgcctgcttctccctctgcctgtgtctctgcctccctctctctctctctctgtgtctctatgaataaaaaaataaagtctttaaaaaaaataaagtataatgtgttagaaggtaataaatgttacggtgagaaaaaaagaaacggaagaggcagagggagttttgagggcacagtttatttaattatttttaaaagattttatttatttattcatgagagacacagagagagagagacagagacataggcagagggagaaggaggctccttgcaaggagcctgatgtgagactcgatccaaggatctggtgatcatgacctgagtcaaaggcagactttcaagtactgagccacccaggtgccccttgatgatacagttttaaatagaatgcccacagaaacctttgtgaggtgactgtagttaaattctgaaaggtatgaaaaatatcttgtgaatatcttttataggagaacatcccaagaaaataaaagtattagtgtggcttggtgatatgaacacaaaaacacattttcctatttttgtgttaagtttcaaattttctatgaaaataattaaaaatgaaaaataaaactggttgtaaagctgacatccagattttatatcagtattttggaaaagaaaaacagaaaattaaataaataataaatataataaatattctcaatctttttttaaaaaaggaaaagttttaccaatttatctcctcagaaacagtattttaactgctttgtttctctacatcctcattgactagttcctatacaatccagcattcgattaggattgttgttcatcactgcataattgcattatgtatgttaatcttacctttccaattatttgttaaacttttttttttaagtttttatttatttattcatgagagacagagagagagagaggcagagaaacaggcagagggagaacaggctcaggcagggagcctgatatgggactccatccagggactccaggatcacaccctgaaccaaaggcagatgctcaaccactgagccatgcaggcgtccctatttgttgaacttttaattctgtcttactttttatacctctcattccctttaaagtgattagacatatataatcaattccctataaaaattacagattgagaaataaaacttagtggtgactttcatttaaatataacctcaattgctaataattctaacagtattttcctatatcgagaatgaaaaaaattaataaataagctgcacaaaatatatctataagcaatttaaaagttttgagtattagagaactggtttaaaaatacttcaagtatttttttcaagtaattggctaaattgaagtataatttgaatagacctttcttagtcacatacttatgattcttcccctaaaaaatttgttttttcagtggtttactttgttgccatacaactaggctacgttgcacaaacattgtgagtaaattctgtcagtttttccttaagatgacagagagtcttaacaatttagatgattgtgattgaaataaaaaatgaaatcagccttattcagcccaaagagtttactgaactctgtaaaagttatttggctagattatgaggtaacacccagacaccaatgaggagtgtctctgaaagatcactcacttagaaccaccctgcatttaggggaagtggtgacaggctggtcaaggaagactcttgttacagacaaatttgtcagtgttagtcacacaactggaacataatgttaagaagaaaatgtatgacactgttgggaagctatgttggaagagctgtggccaaagaaaagagaattacaaattgcacttccatagcacagataacttggaaatatggtacataaaaaaagttttgttttcataatttagttcactccagttataatctattttatatgaggtaaaatctctattttgagaatgtcattacctcaggaaggaagaattactgcattatactgacattaagttagaaatatttttagggttcggaatgattacattttcggtatcagactatccaaatcataaaaacagttttggaatatagtgttcatacctcagcatcaaacatagaaaatgataagtcacaggtcaccaaactactctgagactgtaaatagaaattttgatctctgaatctcaatttcctcatctgaaaaaaatggagatacagactttcttccttctgcactttactggtatgttttgggtataccaaatttgtgagcctcgttcttctcagcaaaaacttgagcaaaaggaagaataaataataattgaaccattcatggtgcccttgaaaagagtgttccccattttcattgctaatcctcctctgaagggagaatttccttaaattttgacctgcagacagcaggtttttacactgctctgccctatcataaattctttgctcaattatcatttattcattcattttttttagtaagttggtcattcaccagttgaggtcattccagctagggactggagatacaaagagggataagacagttccagtcctcatgtataaagagcaagggagaccaactttatacaagtatttacaaatgtactcagttgatgcaaatgtacagaatgctaatcggaactttcaacaggggactaggtaatgtatattgggaatcggaatagattttagatatatcaaagctattaacaagaaaaatgaggagttggctaagcgaagagtgtaaggaaagtgatttaagcagagggaatagcgctgatggattttgagatactgaaaggaaagccaacatggttacagtttagagagacaaaatccagatctcagacaccttattaagggattggtcttaattctgagagaaatggaaaaccattgaaattttttgtttgtttcttgttttatatgtttaagcaggaagtgacataatcacttgcatttttaaaagatcattctaggcactctgagcagaatggtgcccaagtcatagatgtagggaaacaggagacaattggaggaagtgaatgacagggttggcaaagaggaggaggaaaaagtgaactgattcaagagatatttaagagacagaatcaataggatttgattgtgagggaaagatgaatcaaggatgacttccagatttctggcttacggaaatgggtggatgctatttatttaaataaggaatactggaggaagataaagttcaggaaggagaatcatgaatcatagttgaccagcacatagcatacacaatcagccattttgaatataaaaatctcagggtttagattacacatagatatgaaagtacagattttttttaaaagattttatttattcatgatagacacagagagaaagagagagagagagagagagagagagagagagagagagaggcagagacacaggcagagggagaagcaggctccatggagggagcctgatgtgagacttgatcccaggactccaggatcatgccctgggccaaaggcaagcactaaacccagggatccctcagattcttttttaaaaatattttatttatttatttgacagagagcacaagcagaggtagagggagtgggagaagcaggctcaatgctgggggctcaatcccaggaccccaggatcatgacctgaaccaaaggcagacgcttaaccaactgggccacctaggcaccctgcaaatgcaggttcatatcaaaatcatgcttataacttgatccctaagtcttgctttttaaattctgggtgacatttataccttttccttttccttttccttttccttttccttttccttttccctttccctttccctgtcctgtccttgtcctgtccttctttgagatagagtgtacaagagagagcacaagcagggggaggagtagagggatagagagaagcaggctctctgctgagcagggagcctgacgcagggggctcaatcccaggaccccaggaccatgacctgagctgaaggcagatgcttaactgactgaatcaatcactcaggcgccctgatatttaaacctttcagtggtcttttaccttcctattcttgggtatttcagatctttttaggtcagatcttaagtgttgtcctggttccagctttaaattgaacagtttgaagccctctttttttttttttccttttgctttttctcctctttgttatagattgtaaaaccttaacttttcttttatccttagatctctcatgtaagatctaattttatctgaagatcactcccatagcttgaattttcttcatttcttatactttatttttctaataactcaataacttccttccctggagctacccatcttccctgtgttgtatcaatttccacaatggaacaaaaaaggagaaaactattatgaaggatgaagtgtattttatcacaagctattattaccacatgttgctaggggacacctgtttcatagtaatgaaacaggattgaactgaatgtctacaaatggttttttaatctttgcaaaatatagagttaaaaataagaatatataaaaaaaataaaaataaataaataaataagaatatagaaacattgaaaataaaggagcataaaatatatatcaggtaaatactaagcaaaacaaagctagtataaatctatgaataccagaaaatgtaagattttaaagcaaaaagcatgactaaagaggatcactagataggataaaaggagcaaatcaccaggaacaaggagttaagagacaaatcctacaatcataataagagatttcaacacctatttctcagtgatacatcaagcacacaaaaaagcaagattgacaagattatagaaaatttgagcaaaacaaactaatatgcttgtttcaatgggcatatataaaatattctacccaaaaattgcagaatatatattttttgaagtggaatacttttgaaaaaccgtgttgaaagaactctaataaaattacaaagagaaggaaaaaatttaaatgaaggcttattctgtgtttatctgtactgtgtagataaggaaattgagattctgaacattgaaaactctaaaaacaaacaaaaaaagccagatattaagtggtaccgtcagtattagaactcagacttaattctttctgtagcattactataatattaaaacctgaaacttggggcacctgcggtggctcagtcggttaagcatctgtcttcagcttaggtcatgatcccagggtcctgggatcaaggctgctgagatggctgcaatttgtggatcagtataccttagatggttgagctgtgaaggagggaatctcaaagatctgtgggaaggttatcattaggagtatggctaagtgtttgcatatgtgtaaagtgagcccaggtgagacctaccagtagtgactgagaacttaacacaaatgtcagtgctggaagaatgtggaatttcaatccattcacactagagagatcttatcacatgccctaggagtatgacaaaaccagaataggatcaaggtgaacactgtaatgaacagcctaccagaacaaaactcaacatactttaaataaatataatacagttcttcacagtgtagcagctaaaattgttctacacaagggagaaattactagacaagtaactcaagaagaagggaaatatgaccattaagagaaaaaatagtagaaacaaagatgatcgtggatgttggactaaatagatatgtactttaaagcagttattataaatatgttcaagaatttaaagaaaaagatggagtttcccttagaggtgtgactgaacagatggggaagctcaacagaaaaatggaaactagaaaaacaaagtgaaatggaagttctgtaactgaaaaactgctaaacagagcttagagggaaacttactgtggtaaatgctcctaatagtgaagaatggctaaaaatgaatgctgaaagcataaaacttaagaaaagaaacagcagaatgaacaaaacagaaggaaacaataagagaagaaaattacataataaacaaaattgtacaaggctcaagtaaaaggatactaaaagcaaacttctagcaaggttggttaaaaaaaaagaatgcacaaataaacaatagtagaagtgagaaggggggcttagaaactcttccaacattcaaaagataaatttatgctaaagttttttaaaattagattaaaattgatagttttagaaaatatgatttcctgcagaagttcttcctatctcaaaaataaattgaatatctgaatagtagttccataactactaatgtaataaccatgatataaatggttagtaaatttaaaccattcattaagcataatataaatggttagtaaattaaaatctttgttggggatccctgggtggcgcagcggtttggtgcctgcctttggcccagggcccgatcctggagacctgggatcgaatcccacgtcgggttcccggtgcatggagcctgcttctccctctgcctgtgtctctgcctctctctctctctctctgtgactatcataaataaataaaaattttaaaaaaaactttatgcagagatacctgggtggctcagtggtttagcgcctgcctttggctcagggcatgatcctggtattctgagatcaagtctcgcattgagctccttgtgaggagcctgctttccctctgcctatgtctctgcctcttctctgtgtctctcatgaataaataatctttatttaaaagataaaaaaataaagaaaataaaatctttgtgcaaagcaagcttcaaacccagagttctatcagtgaatgaccttacaattccagtagtatacaaattatacaagtgaatagaaaaagatctgggcagccccggtggctcagcggtttggcgccaccttccgcccagggtgtgatcttggaggcgtgggatcgagtcccgcgtcgggctcccgggaatggagcctgcttatcgctctgcctgtgtctgtgcgcctctctctctctctatctctctgtctgtctctctctctctctctttgtgtgtctcccattaatgaataaagaaataattaaaaaaaaaaagtcaacttctaactttttaaaaataaaggcagcccgggtggctcagcggtttagcgctgccttcagtccagggcgtgatcctggagactcaggatcgggtcccactttgggctacctgcatggagccttcttctccctccacctgtgtctctgcctctctctctctctctctctcatgaataaataaataaagtcttaaaaaaaataagaagtaaaaaaaataaagctagtataaccttgctatcagtataacctcagacaatagatgacctgtcatgaccttagtgaaaatcctaaataagttcagttagaaaatggaacctgacagtatgcaaaggagataatacatcattaccaggatgagtttatctcacaaatccaggtttcgtttaatattaaaaataaactgtgtttgattaaattcaacaatttgaattttaaaacctcttaataaataaaaagggccattctaaccagataaaggttacaggccaaatacagcagctaacattattcttaatttgatatattgaaagcattctcattaatctcagaaagctaacattattcttaatttgatatattgaaagcattctcattaatctcagaaagaagaaggtagcataaaggagaaaagatctaagtgaatctttgggtgagaaagacaaccctggaactctacaacactgtacagcccaatctaagtaaatgatcatacttcttgattataggactcaatatttttaaaaataattttttcccaaaatgatttgtaaattcaatgcaattccagccaaaatccaaatgaaataagtgtgtgtttgtgtacgtgtaaattgtcaaactatgtaatttatatgtaagagccataaatatacttatgaagaagaacaaggtggaaagatttgccttacaggttaccttattaaaaagctatcataactaagccttttggctccctgaacagcatcatggtggttggaaaaagcaagaaccttacaaaagatggccagaagggagtaaaaaagaaagggtcgatccattttctaagaaagattggtatgatgtgaaagcaccagctatgttcagtattagaaatattctaaatatactagctataagaactcaaggatccaaacttgcatctaatggccttgagggtagtgtttttgaactaagcttttctgcaggtagaatgatgatgttgcatttagaaaatccaagctgctactgaggatgttcaggacaaaaactgcctgactaatcttaaactgtcataaatgtgctccgtggtcaaaaaatggcagaccctgattgaagctcatgttgttgtcaagactactgttggttatttgctttacctattttgtgttggttttactaaaaatcacaacagtcagatttagaagacctcttaggttcagcaccaacagatctgctaaatttggaaaaagatgacggaaatcatgacccaagaggtgtagacaaatgacttgaattaatcactaaatcaatttcaagcagcatatggaaaaagacaaagaaaaggcttgccaatctatttatccactccatgatgtctttgttagaaaagtaaaaatgatgaagaagcccaagtgtgaattggaaaagctcatggagcttcatggtgagggtagtagttctggaaaagctgctggggatgagactggtactaaagttgaataagctgatggatatgaaccaccagtctaaaaaactgatttaaaattcagacatctaatagtgacaaacaaaaaaaccttgtaatatctaaaaataaaaggtataataattaaggcactgtgttgctggttcagggatagaaaaaaatgacgaatagaatagaactggatacctaaacaaaaccacacttatgtggaaaattgatttgtgacaggcttttattgtagatcagtgaaagaaaaagcagacttaaaaaaaagcattgaaacaattgaaaaacatgacatttaaacccctccttcctaccatgcactagaataaagtccaaataaatcaatgactggaatgagaaggacaaaggataaaacttcttgaaaactattacagaaaaatattttctggctttgaagtccaaaaggatttcttaaagaagatctagaaagtataaatcaggaagcaaagatgacagccaaaagtcttgaagtccaaagttggaggactcatacttcccaatttgaaacctattgcaaaactacagtatcaagacactgtggtcatggcatgaagatagatctataggtcaatggaataaaatggaaaatctatatataaacccttcctttaaggccaattgatttcccacaagggtgccaagataattcaatggagaaaaaaataatgtcttcaacaaatggttctgggacaactgaatatccacatgtgaaagaatgaaattagactcttaccggaaccctacacaaaagttgactaaaaatggatcatagacctaagtgtaaaaaagctataaaaccactagaagggaacacctgggtggctcagcagttgagtagagtctgcctttggcccagggagtgatcctggagttccgggatcgagtcccatatcaggctccctgcatggagcctgcttctccctttgcctatgtctctgcctctctctctctctatgtctctcatgaatagataaataaaatcttaaaaacaacaacaacaacaacaacactagaagaacacatagtagtaaatcttagtgaatttgggttaggcagtggtctctgagatacaatccctaaaagacaagtgataaaataaatttgaaaaattgcacttcatcaaaattaaaaacttgtagagaaaactatgccatcaagaaagtaaaagagatctcatacaatgggagaatatattgattgagggtgataaagataagccctccaacagaacaagagatgcaaatactggcagtcaagaaagcaggccctgtaatattaaggcgtgaaagtagggcaccaacagtatctgctacaaagtcccagactctcttcagtagaattaggcaggcccagggcacctgggttgttaggcatccaccttcagtttaggtcataatctctgtatcctgggattgagcctctgtatcaggctttctgctcagcagggagcctatttctccctctccctctaccttctgctccacctgcttgtgctctctctctctctgtcaagttaagtaaataaaatcttttttaaaaaaaggagaagagggacatctgggtggctcagcggttgagcatctaactgcctttgattcagggcttgatcccggagtcccaggatggagtcccacaatgggctccctgcatggagcctgcttctccctctgcctatgtctctgcctctccctctgtgtctctcatgaataaatgaataaaatcttaaaaaataataaaataaaaaaggaaaagaattaggttgtcccgggtcttagcttgagcttcccccagaagtatacataagctgaggcaaaagactcatgagctgttactttattagggcaagcagttccaagatacaagggcagaaaaggagaagcaaagcagaggagagagaaccagtatgaaaatgcattgtggattttgggccattattaaatgccattgattgcttgatctcttgggatagttcttacgaagccttgaaaaccccttggacttttgcactcgaagacccaaaaagcacctgaatacaatttttttaaaataaatttattttttattgttcaatttgccaacatacagaataacacccagtgctcatcctgtcaagtgcccccctcagtgcccgtcacccattcacccccaccccccgccctcctccccttccaccacccctagttcgtttcccagagttaggagtctttatgttatgtctccctttctgatatttcccacacatttcttctcccttcccttatattccctttcactattatttatattcctcaaatgaatgagaccatataatgtttgtccttctctgattgacttacttcactcagcataataccctccagttccatccatgttgaagcaaatggtgggtatttgtcatttctaatggctgagtaatattccattgtatacataaaccacatcgtctttatccattcatctttcgttggacaccgaggctccttccacagtttggctattgtggccattgctgctataaacatcggggtgcaggtgtcccggcatttcattgcatctgtatctggggtaaatccccaacagtgcaattgctgggtcgtagggcaggtctatttttttttttttttttggcaggtctatttttaactctttgaggaacctccacacagttttccagagtggctgcaccagttcacattcccaccaacagtgtaagagggttcccttttctccgcatcctctccaacatttgtggtttcctgccttgttaattttccccattctcactggtgtgaggtggtatctcattgtggttttgatttgtatttccctgatggtaagtgatgcagagcattttctcatgtgcatcttggccatgtctatgtcttcctctgtgagatttctcttcatgtcttttgcccatttcatgattggattgtttgtttctttggtgttgagtttaataagttctttatagatattggaaactagccctttatctgatacatcatttgcaaatatcttctcccattctgtaggttgtcttttagttttgttgactgtatcctttgctgtgcaaaagcttcttatcttgatgaagtcccaatagttcatctttgcttttgtttcttttgccttcgtggatgtatcttgcaagaagttactgtggctgagttcaaaaaggatgaaagatctaaatgtgagaaaagattccatcaaaatcctagaggagaacacaggcaacaccctttttgaatacaatttttaaatgactgattgcttttcccccacaggtcgttagttgatatctgtaaattaagactcttctacacctcatacctcaggctccctttaatcaacatccaaaacataattgatggtaatggatagcagggataattgaaatccaaagaataatagctaccatttagtaagtacaaggcagttttatataatgtctaatcctcacaaagtagcttttgttatactgattttattaatgtccaagctgaaattcagctaatttaaggaactcggccaacatcacaaaactaataagtagcagaccaggttttggaaccatatcttctttttttttcttttttaaatctcaaaacaatgctctttctattacaccagggtgcctcttagaagaaaggattgagattcctaaatctcttcttagccaatactttttaaacatgttatttattttttaagtaggccatataaacacatggtttaagattcaagaaatagaaaaggatataaagtgaaaactattttttccctgcccataagttacccagttcctcttttcaggggcaactaatgttacaagagctttgtgcatcttctccaaaatatttatgcataaatataattgtttacccttttaacaaaaagaggttatctaccaaatgtatactgttgctagatatcttagagtattaaaaaaacaaatggctataagattttaggctttgtgtgtagaagaatatggaaaaagcacttttccaagatggaagtttctgatgaattctgttcaaactataatttattatcatttggcatgtctgttacccttgctcaacatagtttttgtttaccatatctttttcagtgaagagccagatagtaaatattttaggctctgatctctgtcatgaccactcaactctgctgttatagcataagaacagtcattgacagtatgtaaacaaatggacaaatgggtgggttctttttttaaatattttatttatttattcatgacagacacacacacagagagagagagagagaggcagagggagaagcaggctccatgcagggagcccgatgtgggacccgatcccaggtctccaggatcacgccctggccctggcccgaaggcaggcgctaaaccattgagccacctagggatccccaatgggtggattctaataaaaccttattcacaaaaacatgtgacaggccagatttaacctgtaggtcagtttgctgtctaggggggaactttttattttttattgtttttaaagattttatttatttattcatgagagacagaaaaagagagagagagagagaggcagagacacaggcagagggagaagcaggctccatcagggaccctggcgtgggactggatcccgggtctccaggatcatgccctgggccaaaggcagcactaaaccgctgagccacccggggctgcccctaggggaaacttttaaactagaaaaatatagcacaccagcatcatttgggtataccagaatgattaaataaacccctgatttgtactgtttgtcaatttctatagtgtaaatactcctaaaaaatggctgagttcaatctaccaactgtttagcaataggattgcaaaatttctaaatatttaagaattggttctcatgatctgatgagaggcagttacagcgcagcactacatgcaaaacctcacacctgtagaatagcaaaaatcaacaacataagaatcaacaggctgttggtgaggatgtggaaaaaggggaactctcttgcactgttggtaggaatgcaaattgttgcagccactctggaaaacagtatgggggttcctcaaaaagttgaaaatagaactaccctgtgatccagcaattgtgctactaggtatttacccacaggatacaaaaatactaaatcaaagggattcatagtagcatcatcgatatttatagtagcatcatctacaatagccaaattatgaaacttgcccaagtgtccattgaatgatgaatagataaaaaagataggggtgtgtgtgtgtgtgtgtgtgtgtatatatatatatatatatatatatatatatatacacacatgtgtatacacacacacatatataatggaatattattcagccataaaaaataatgaaatcttgccatttgcaacgaaatgaatagagctaaagagtacaattctaagtaaaataagtcactcagagaaatacaaataccgcataatttactcacatgtggaatttaagaaacaaaaaataggggaatgagcatgggggaaaaaagaatgagagaccaagaaacaggctcttaactatagagaacaaactgatggttatcagaggggaggtgggtcagggatgagtgaaataggtgaaataggtgatggagattaaaaagtacacttatcataaagagcactaagtaatgtatagaattgttggatcactctattgcatacctgaaactaagaatataacactgtgtattaactatgttggaattaaaaattaataaaagataagtatactattcgtatactttttccattcacatgttctttatccattcatcaatcagtggacacttaggctgctaccataatttggctgttgtaaataatactgcaataaatataggggtgcatgtattcctttgaattagtatttttgtatgctttgggtaaatactcaaagtagcgtgattactggattgtggggtagtttccatttttaatttttaaggaacctccatactgttttccagagtggctgcaccagtttatattcccaccaacagtgcaagagggttcctttttctctacatccttgccaacatctgtttcctgtgttttttattttagccattctgacatgtgtgaggttatatctcattgtagttttgatttgcatcttccctgatgatgagtgatgttgagcatcttttcatatacctgttggccatctggatgtcttccttggaaaaatgtctgttcttctacacatttttattctggattatatattttttatcttttgttttggtgtggaattctatcagttctttatatatttgaatactaaccctttatcagatatgtcatttgtagatatcttctcccattcagtaggttgccttttagttttgttggttgttttctttgctgtgcagaagctttttattttgatgtagtcccaatggtttatttttgcttttatttccctttcctcaggagacatatctaaaacatagttaatactgggatgcctgggtggcttagtggttgagcttatgcctttggctcaggtcatgattccagggtcctgggatcaagtcccacattggggttcctgcagggagcctgcttctcctgctgcctaggtctttgtttctctctgtgtgtctctcatgaataaataaataaaatctttttaaaaatttacaaatttcaaaattgaaaataaaatatagttactacaactgatgtcagaaaaattgcccgtgtgctcttctaggatacttatgattttaggtctcacatttaggcccttaatccactttgagtttattttcatgtatggtgtaggaaagtgatccagtttcattcttttgcatgttgctgtccagatttcccagcaccatttgttgaagagactatctttttcccattgcatattcttgcctcctttgttgaagattagttgaccatataaatgtgggtttatttttgggctttctgttctgtcctattgatctatgtgtctgtttagtgcagtgccatattgttttgattactgtagctttgtaatataactttgaagtctggaatgtgatacctctagttttgtttttctttttcaagattgctttggctatttgggtcttttgtggttccatacacattttaggattgtttgttctagttctgtgaaaaatgttagtattttgacaggattgcattaaatgtgtagatttcttagggtactgtggacattttaataatatttgttcttcagatccataagcatggaacatctttgtgtcaaacttcagtttatttcatcagtgttttatagttttcagagcacaggtcttttaccgtttgattaggtttattcctaggtattttattattttcggtgcaattgtaaatgggattgattccttaatttctctttctgctgctccattattggtgtgtagaagagtaacagatatctgtactttgttttttttttatcttgccactttactgaattcacttaccaattttagcaggtttttggtggagtcttgggttttctgtatagaatatcatgtcatttgcaaataatgaaagccttactttttccttaccaattcagatgccttttatttctttttgtggtctgattgctgtagtaggatttccagtattatgttgaataaaagtggggagagtgaacatccttgtcttgttcctgaccttagtggaagagctctcagtttttccccattgagaatgatattagctctggatttttcatatatgggctttattgtgttgaggtatgttccctctaaacctactttgttgagggtttttaatcatgaatgatgttgtactttgtcagaagctttttctgcatcttttgaaatgatcatatggtttttatcctttgccttattgatgtaatatatcacattattgatttgcaaatattgaaccactcttgcatcccaggaattaatcccaattgaatatggtgaatgagtttctaagtgtattgttgaatttgttttgccagtattttgtcgaggatttttgcatctatgttcatcagtggtatcaatatcagcctataattctctctctctctctctctctctttctctctctctctctcttttttttttttttttttttttttggtgtgcctttatctggtttttggattggggtaatcctggcctcatagaatgaatttggaagttttccttccttttctgttttttggaaaagttggagaaaaataaatttcaactcttcttcaaatgtttgatagaattcacctgtgtaacttgttgggcattttttggttactgattcaatttcattgggggtaatcagtcttttcaaattttctgtttcttcctgatctgttttgggaggttatatatttctaggaatttgctcattttttcttggttgtccattttgttggcatatgattttttgtaatattctcctataattgtttgtatttctgtgatgctgcttgttattttttctcttttgtttctgattctgtttgagtgctttctctctctctctctcttttttaaaaaagattttatttatttatttacctgagagagagagcaagagcacatgaatggggggaggaggagaagagggacaagtggattccatgctaagtgcagagcccaatgtagccccatgacccaaagatcataaccaagagttggatgcttaactgactgaaccacccaggtgctccactctctctctttttttgctgaatctgagtagaggtttatcaattttggtgaccctttcaaagaactaactcctggttttattaatctgttctattatttttttagtttctatatcacttatttctgctgtaatcttttgtttccttccttttgcctgggtttgagttgtgcttgttctttttctagttcatttaggtgtaagtttaggttgtttatgtgagatttttcttgcttcttgaggtaggcctctattgctataaacttccctcttagaaccatttttgctgtatccctaagattttggactgttgtatttttctttggtttccatgtaattttttacttcccctttgattttgtggttgatccattcattgtttagtagcatgttatttaacctacatgtatttgtagtctttccaggtttttttcccttgtggttggtttctggttttatagtttttggtcagaaaagatgcatggtatgactttgacttttttttaatttgttgaggcttcttttgtggcttattatgttttttttttctgctgttttaggatggaatcctctggatatgtctgttaaatccattggtccagtgtgtcattcaaagccactgtttccttgttgattttctatttggatgatctgcccgttgatgtaagtgcgtgttaaagtcccctactattattgtattttttttttatgtttgctattaacagtttttttttatgtttgctatttattttatgtttgctattaacaattttatgtatttgggtattcccatgttgggtgtataaatatttataattggtatatctgcttgttgaattgttgtctgtattatcatatagtgtccttctttgtttattgttacagtatttgttttaaggtctagtttgtctgatacaaatattgctacactagctttcttttgacctacatttgtgtgataaatgtttctctatcctctcactttcacctgcatgtgtctttaggtctgaagtgagtctcttgtaggtggtatgcagatgggtcttgttttttttaatccattccatcaccttatgtcttttgattagagcatttagtacttatatttaaaataattgttgatagatatgtatttattgccattttattatttactgccattgttttgtgtttgtttttgtggatattctctgctcctttattctcttgctctcttctcacaccataagttggctttctttagtgatacactttattttttgtgtgtctgttactggcttttgatttgtggttaggtttgtatataacatctacattaggtttgtatataacatctacatatagcagtctacgaagttgatggttgcttaagtttaaacccattctttactcctcccttcctcatatttacgtatatggtatcatacttcattttattttgtgagtcccttaactgatttttatagatatatagatatccttatttttacaacttttttgttttgtactttttaaaattatggtctttcctttctactcatagagtcctctttaacatttcctgtagggctggtttagtggtcatgagctcttttaacttttgtttgcctgggaagctatctttccttctattctgaatgatagccttgctggatagaatattctttgctgcagattttttccttttaagcactttgaatatatcatgcctctcctttctggactgcagtttctcttgaaaaatctgctgatagctttatggggtttcccttttatgcaactgttttgatgcttataaaattctttatcactgcatttcaactatgtgtctccatttggtccttttgggttgattttgttgggggatctctgtgcctcccagatctgaatttctgtttccttcccccaaatttgggaatttttcagctattatttcttcaaataaactttctaatcccttttctatctcttcctctcctggggtccctctaatgctaatgttattacacttgatggagtcactgagttccctaagcctcttctatttttgcatattttttttctttcaactgcttagcttgtttactttccattattctaggttgctgattcattcttctgcttcttccagtttgctgtttattccatgtagtgtattttgaatttcagttattgtgttcttcatctgtttggttcttttttctctgtgtgttaaggatttcattgatgtcccttactcttaagtccagtgagaattactttaaattctctatcagacatatgactaatctctttttcacgtaggtctctttctgtgattttgtcctgttttttcatttgggacatattcctctggatcctcattttgcctaactctctgtctgttcctatgtgttagaaagtcagctatgtctctgttcctgaaagtagtgggtggggccacattttttttaaagattttatttatttactcatgagagacagagagagagagagagagagagaggcagagacacaggtagaggagaagcaggctccatgcaagaagcctgacatgggactcgatccagggtctccaggatcacgccctgaactgaaggcagcgctaaaccactgagccacctaggctgccctggtgggccacatttttaacaaggtggccctcgtcttctttcacagaagacatgcagttgctgtggaaaactgaccacttgagctcctttgcaaagcatgtgcaggcaaggcttcagtgcctgcaaggtgtgcgtatctgtcctcttccatggggatgcatagtcactgtggagactgggccagctggggcagatctgcaaagcacacctgggcaggggctacagttttaacaaggtatgcacaccttctgtgggtgatgactacctttcgcagccaggactgagtccctgaaaatcacacaatgggaagatatagtcttggcaaggtttgcacagatcttctaggggaggggacttgcaacaccagaagtgaggcaagcccagctggagggggtggggcatgtataaacaaattaggtagtgaatgctggttcccacaggtggctgtgtgcttatgctgggttgtggaagacagaagtggcacctgctaactcctttgttctggagaagttcttcacttactctgagattagtaactatccctcctataagccctatgcgtttttcaaactgctgattctaagctgtaactccttgggctgtttgttgtgctgtctcttaagggcagggatttaacttcctattgccccctggattctcccagaactaagctaactggtttttttttttttttaatttttatttatttatgatagtcacagagagagagagaggcagagacacaggcagagggagaagcaggctccatgcaccgggagcccgacatgggaatcaatccagggtctcccggatcgggccctgggccaaaggcaggtgccaaaccgctgtgccacccagggatcccagctaactggtttttaaagctctagactttaagtcccattgactgtaaaaacttacagaatttggcccttctgattttcaaagccaaatgctatgggaattcatctttgctgtgcaggcaccctggtgtgatagtctgtttctcatcctttttcccactcaaggctctccccttccctccctccagtggccagacctgcagggtttacctccccaccaagtctctacccttcctaccctctcagatgtgacctcttgtctacatttaattgtggagtttattctgccattttggggtcatttcctgggttgtttacactgatgtgttatctcgtatttgtatgacaaggtgagtttagggtcatcctacttggtcttcttccatagttagttccttagttaggtaagatttttaagtcatgaatttatgttgaattttatcaaatgcttttctacatctgttgagatatttgtatggtttttcactttaatcagttaatgtagtaaattacattgctttctttttcttagtgaaatcaactttgtacttctgaaataaactcaacttagtcatgttagattttcctttttattcttgctttcttttatacttacttgatttgacttgttactattttgttaaggatttatgcagctatttgtgaatgatattgtcctagaattgtccttctttttactctttttataatgtcttcacttactgtcacactagctctgaaacattttggaattatttatttcttgaccattttgatagaacttgcctagtaaggggcacctgggtggctcagtggttgtctgcctttggctcaggtcatgatcctggggtcctgggatcaagtcctgcatctgcttctccctctgcctatgtctctgcctctctttctgtctctcatgaataaataaatgatatctgaaaaaaaaaaaaaaaaacgaaacaacttgcctagtaagtcatctgagactggagtttgtgaaaattttggacctctttatttctagtagtgctttttgccttaaagtttattatgtctcacaataatctactatattagctatcttttggttaaaatctgcatgatatattattttatcattcttttactttaaacttttctgtctaccttattttttggtatctttctttcaaagaaagtatcattagatttttagttttatctagtctggccatcttaccttttaactgaagtatttaatctacgttatcatttaatatcttatatatttagatttattttttttattttttattttttttaaatgctgttgtatttttttttaatttttatttatttatgatagtcacagagagagagagagagagaggcagagacacaggcagaaggagaagcaggctccatgcaccgggagcccgacgtgggattcgatcccgggtctctaggatcgcgccctgggccaaaggcaggcaccaaaccgctgcgccacccagggatccctatatttagatttaaatctattattctactttgtgatttctagttgtctaatttctttttctctcctttattgaattgttttggattaagtttttctgaataatcattctatattttaccctttacttagaagttaaagtaagttttttttttttttttttttttagtgattactagaaatttcaacatgcacattaactttaaaaagtcctaagctggtggggatccctgggtggctcaacgggttagcacctgccttcggcccagggcgtgattctggagtcccggaatcgagtcccacatcaggctccctgcatggagcctgcttctccctctgcctatgtctctgcctctctctctctatgtctttcatgaataaataaacaaaatcttaaaaactaaaaagaataaaaagtcctaagctgggatgcctgggtggctcagcagttgagcgtctgtcttcagctcagggcgtgatcccagggtccgggatcgagtccaacatcaggctcgttgcatggagcctgcttctccctctgcctgtgtctctgcctctctcgctctctgtctctcatgaataaataaataaattctttaaaaataataaaaattaaaattaaaaattaagaaataaaaataaaacaaaaagtcctaaactaatcaatacttttacctttggtataacataagaatacttcaagtccacttatcttcctctttatttctgctatttttgctgtgtatttttagttatgtcttttcaaattttattccataaatcattattttttacctatatttgtcaataaatttgtttcttcttttgtccatatcaggcaatatagactattcctttggttgataatctttatgagtccttttctgctgtcgtttctgctggttcttattcatgatgccttgtttcttgtatgcttgtttttttttgtttttactataaactgttccttttcttgaaaactatttggtgattctgtgaggacacagatgaagatgaattccttcaaagagtattaaatatacttctaccaagtgcctagagctctaccaataacaggaccacttactttaaaattgtagtttgaagtgttgggaatcaccacttgatattttaagaaatattttaaatgtttattaagcatttttaggtatgcctgggtggctcagcggttgggcatctgccttcagcttgggttgtaatcctgggatccaggatcgagtcccgcgttgagctccctgcgaggagcctgtttctccctctgcctgtgtctccgcttctctctctctcagtctgtgtctctcatgaataaataaataaatcttcaaaaaaagcatttttagatattggtaggatataggtattgtataactgagtgccgtattactgaaattgaaggcattgtttacattttcttctgagtttttttatttgtactaaaatatacataaaatttactgttttcataaaatgtacataacataaaatttaccattctcaccagtgactttacatatattcacaatgttatgcaaacatcagcatcatccatttctagaacttttctatcttgaaaattgaaactctgtccttgttttttgttgttgttgttttttttttaagttttatttatttatttatgataggcatagagagagagacaggcagagacacaggaggagggagaagcaggctccatgcaggaagcctgatgcagacctcaatcccgggactccaggactgcaccctgggccaaaggcaggcgctaaaccgctgagccacccagggatccccgaaactctgtccttgttaaagacaaattcctcattttgtttctcccagctcctgataattaccattctactttctgtccccatgattttatatactgtaggctcttcatatgaggggaatcatacactattcaccctttggggttgactttcttcatttagcttaatgccttcagatttcatccatgttgtagtatatgtccttataaaagttttatttatttatatttttaaaaagattttatgtatttatatactagagttagaaagagaggcagagacacaggcagagagagaagaagcaggcttctcatagggagctcgatgcaggactcaatcctgggatcccgggatcacgccctgagccaaaggcagatgcttaaccccctgagctacccaggtgtcccccttttaaaagttttaaagtgattttcttttcatagttagatacttaattcacctagattaatttgtgtctaggtgcagagtgtatatatctaaatttattacaatatgagtgtccatttgtcccaataccattgttgattattccatccttttcatattaatttgtaatgtcatctccgtcttctgtttaatattcatgtaaatgtaagcctttttctaagctgttttccctagttagtctgtttttctattttgtttttctattcttatatggagaaacagtatttgttattacagcttttaaagaactcttaatatctgataacacatcctccactcagcaggtctgagttttcttagcctcagttctggtcccagggagctctgcatagtcctgtaggtgagggttgagagagaatgcgggccaagaatgtaagccactttgcttgtgcggtcaggtcctgttgggttcagttctgatggttgtttctacttgattgctggagatgccaaagctatagatatataaatcagaaagtacccacttcatggcacttcctagactgagtcatcagttgtggtccattgacctccataaagcctaatagcttcctcaagagttgaaacatttgacatatccattcagtaaatattcattgagtacctactatattgtggctgtggtaacaatccatatagtctctgttctcatgatatttatattctagtttattaaaaggaaactagttattttttgctgagtacagtgctttactaaaaaatgcgaagggccttctacatgattattaatgaaatttcatcctttattggtctttattctctatatttcaaatagttccaaagacatggtaatttgaaaaacgcttgattgctggtgatgaaatctttgaccagagttccatgttttaatgtgtacagcattcactggctaaaaatttatggatatctgtgtaattgaggccagatttatgacacgcaacaaaatctacaggagtgacaaaggctgccaccaaaacttcacactctgaacatgcccaccacccctgcatccttcctaaaaatatctcacccagagaatgcgcctctttactctctcagtctgtaaaatgtgatggttaaaaaaaataaatttagcaaacggtgttattaatactagccttttatgaaaactagtcacacaaaaaaagtaattgaaaattgcccttttgaatagatgcattctggctcagggagaaaggactggcaagaatttctttgaattcaaatttaaattatttcccttcattggggcccctgggtggctcagttggttaagtgttcaacttctgatttcagctcaggtcatgatctcagggccatgggatcaagccccgtgttgggatctgtgctcagcagagtctgcttgagattctctacctctccctctgcccttcttcatgctcatgctctctaaataaataaataaataaagttaaaaaaaaatgatttcccttgatggagaaccaaagagatatcacaacaaactgaatgactccgttgttcatcttaaatgctgataggtgacttacaaagttgacttaactggaaggcagaactacacatttctgtacaagattggtgtgattaatatttattatggaaactattatttcagttcttacatgtcatagaaattacagtattcatggtaaaggaatcattattaatcatctttcttttctaaaacaattcttgacaaatatgtctctgagattctaaaagacacagacaaaaaaatcagaacattttaacccaaaaatgacataaatgacttaccttcttgccaggtaatgtttatcagaatgtttaccaaaatgaggctgcagtcattgtttctgtcagcaactttgcaatattttgtgtatatcttataagggattgacctgccataatttagaaattaaaatactattgctatttttttctttttttaaaagttatttgagggagaaaaagtgagcaagtgagagagcatgagcagggcagggggagagggagaagcagactttctactgcgcagggaaccctacttggggcttgatcccagaatgctgggatcatgacctgagctgaaggcaaatggttaactaacttagccacttaggtgccccttgctatttatttctatatctttatgtggttatgggttctcaaaatccacacaaaagagagaaatggcctagataaggggtgcttatctggctcttttggtagaacgtgcgactcttgatcttggggttgtaagtttgagccccatgttgggtgtagagattacttaaaatgaaattgtaaaaaaaaaaacagccccccccaaaaaacaaacaaagaaatggcctggattctaaacctgacatttgttgttggcttcctttaaatcacttgtgtccaaatttttctttaaagattttgtttatttattcatgagagacagagaaagagacagagacatagacagagggagaagcaggcaccatgcagggagcccgatgtggaactccatcccggaaccctgggatcacgtctgagccgaaggcaaatgctcaaccactgagccacccaagtgtcccacacttgtgtccaaatttgataaaacctgtagcctgataaaacaaacgggaaactctttttccttgatattaaattaacaaccactttttaaaaagattttatttgtttgagagacagtgagagatagcactagtggagtaggggcagagggaaaggaagaagcagattctcatgctgagcagagagcccagtgcggggctcaatcctaggactccaggatcatgacctgagccaaaggcgaacacttaaccgactgagccacccaggtgcccttgaagaaccatttttaatattaaaacaaaaatgaatttattgaatagattaaaattggcatgaactttaattgctaccctggttgcttcaggcatattgcttcaggcagctaatggtgaactattcaaatattcccggaaaagcctgagagtgtgaatgagagtcacctctgcctcagtgtattatcacaacaagttatgtaatttaccatcatgtttctcttttagttttcccatcagaataaacaagcacaccctgtttcatttattccacaactgtctatctattagtacctagtatgttcaaggctctgtgctagattctgtgaatataatggtgaataactgaaacagatcagagtgttcagaggtaagactatcacattttatataactaaaatttatctcatattttcttgtgaaaattaaataggaaggtctgtgtcatctgggacatagtagttgcccaaaacatgagtgcctcagagataacataaactatatgtaatcagcaaatcttgattagaccttaattaaaaaacaaacagctataaaggatatcattgggacagttttggacgtttggatttcaacttcatatgaaatattaaagcattattgttcattttcttcagtgtggcaatgacagcaggattatgaaagagatatccttgatattaaatgatgcttgaagaggtatttggtgtgaagcatcataatatctgcaacttagtttcagtgtttcagaaataaatagttatatagagaagaatgttaacaatggttaaatgttgttggtggtttgtaggtgcccatggtactgttctttcaacttctgaatgtttgaaaacctctagcataaaaagttgtgtaaaacttttaatttctttttttcttccttgttaagaataatttatgattatgcagttccctcagaaggaatctagccccaaaaatatgagttagaaattggagaccatacaaatttaagaccatttcagaacagattttactgtttttctttgaaatctaagttgcatcaatcaaaggtaaactcagatctgaggcagcactcttcccgaactttgtcacaatgatttaacttctgtttgcctgaactctcttttaccttgtacattcacctttgccagaggaattgtgtcttcacagtcaccagcaaagtactctcactcagtccacacaaacttttgcattatagcacaccaggatctggggaagtatggtaccaagatgatcagaagatgcagtttcacttggtgagtttacagttttattggaaagttcaacatgatgaagctgaagaacacactcagaacaatttcaaaagcacaaattaaaatagcacagttccaaaagggggttataaagaggaagaagctgttgctcacatcagcttggaaagaaagctatcacaataatctagatggatatccatggatttcagaccttcccatagattaatttttttttctgagtccacgtaaattcagggcaccaccactgggactttctgatgctactcacagttccaacccaggcattctttttcctaaagctgaagccagggagtgaccttacatatctaatcagagataaattgttttttgaccctggttttcatcaagtccacagagccccaaagagtaaaaaatgagtctagtatgctgaatatatattgtttactgcaatataacacattattaggtaatcatgacattgatggtccttagagttggacatagaagggtgtcattgattttctcaagcaatgccagagaaaatgatagatcccctaaaaaagtgatggtagggaaaaatgagctcaatttataatagacactaagaacttctgcagattctatgacagattcattaataatatttatcctgtctgacagagactattaaaattctgatatatttgctcaggtgacttctgctaatacaaaatatatcaacttgatattttgcggaagactgaagattcattaaggaaaaatgtagaaaagtgtttctttttacctctaggtggtgctatgtattgttatatgtaagcacaagactgcctagttttgaagttgtaaagattcctaaggattatgcattttacagatgaacaaactgagactcgttgaaattttgtgctgtttaaaataaaaattctggttagaggcagagccaggactatggcctctttttgtaaaatgtttaatgtatgatttattcaagaaaaaattagtcattctataattatttcaacagtattacactgttgtaacaggtttaagagttcattttacttttactgatttatgaagttttctttagaaaattttaaaagaacatttgcctaacttatatgaaaatagattataaagaaagatgataggattttattatgcatacatcaaaattactttactaaagaggaactcatgtttaaagaggtaattcatttaaaaagaaacacaaattgttgatagttatgtgaaaacatattaaaacccactaataatcgaatcataactaaaacagtggtattcctattccttccagatcagcaaaaatctatgattatcctcagagatactgaagcaatgataaaataagcaccttgccctctgtcagtgggagcataaattggtacagcttcctctgaaagctaatttgacagatgttatcaggaaacttcaattgtgggacaccagtggctcagcagttgagcatctgcctttggctcagggcgtgatcctggagtcctgggattgggtcccacattgggctccctgcatggaacctgcttctccctctgcctgtgtctctgcctctctctctctctctctgtgtatctctcataaataaataaataaaatgtttaaaaaaaaaaaaaaggaagcttcaattgttcaaactctgacatagttcagcctctaggcccttctctgtgggaataatcagaaatgtggacagtgatttatatacaaagatattgatcacagcataatttataatacttataatcattttataaattagggtatggttatgatatcgggcagccatttatagactgcttgcaaataattttaaatgacataagaaaatgttaatattttgctgaattagagaggagattaaaatctataaacctggggctacctcagttatataactgtagatcatctgagattggagattctctgtctccctcttcgcttccttgtactggtagtcatatgaggaaaccctacaatattatttcccagaggcagaataattatgtctgatttgctttcccttttaacttttttttttaaagattttatttatttattcatgagagacacagagagaaagaggcagagatatagacaaagggagaggcagtctccatgcagggaacctgatgtgggagttgattctgggactccaggatcacgctgggagccaaaggcagatgctcaactgctgagccacccaggtgtccccccttttaaactctttaattaagattgagaaaatttctaaaccctaaagtctaaagttcattttagacaggactgaataatcatgtctaaacacacctccctgaatatatgttgtccacttttcttcaagattttccttctcctttctttattgtattctatggtttttgttgactcaatttttaaaaaagattttatttatttactcatgagacacacagagtaaaggcagagacacaggcagaagcaggctccatgcatggagcccaacgtgggacttgatcccgggtctccaggatcacaccctgggctgaaggcggcactaaacccctgagccacccagggatcccctgttgactcaatttttaaaatctgtttttgtgcattgtaattcaaattaagttttctaactaacataaagttcacacattcagatgtcttgctagatgctccttagttcattcttgaattaattactgaaaggtgctcggtttgattgaaagctgcttgctagctcccggtccccaacttaaaactattcattcttgttctaggaaaaactattggcccatctgaaacttcgctttgtagttcaaattgtcttgtaatgatgcaactcataaaaagcatattcaatgttatacagtgaaaaaaagtctagaattaaacggcaagagaccttcactttttcctggggattggttagcaggacattaaggaatgaatggtttaacatttccatctggcactaattatatgtgatctttggcaagttatttatcctcagtttttttgcctataaaattaaggtggtagcctgatgacctatgactcatgacctgcctgccataggagcagaatatttgaaattgtgctgacattggaaaatctggggcatgtggctcctatgcatttaagatcccttctgattttttttttaagatttttatttatttattcatgagagacacagagagagagagagaggcagagacacaggcagagggagaagcaggctccgtgcagggagcctgacatgggactcgatcccaggtctccaggatcaggcctgggctgaaggcggcactagactgctgaaccaccagggctgcccaatcccttctgattttgaaatgcttttctgctcacagtgtccttccaacagcatcttcagcaaggaacctcctggactcttgtctcttaagcttgatcccagatcccatagtttagaggcactgctggctactattttcttagttactcaggtaaggcagtgcttaagtattggagccacaggcaaagaagctgctaccaaactcctaaaataaggccttgtgtgagccccaggcatggacacatctggaagagtacaactatatgcacagatgtttgtacatcctttttttgcacagggaaatgttaacagaaactctggtgtgtaacaaatccctaatcctctccatctagggcctgccttaacgtagatagaaaataaatagctggctacttattatacaagtcatgatttgaggggataccagagagggtgcttcatccaaaaatacccattccactgagtgttagtccaatgttactgagtttacctttggctcttgaaagctaccacaggggatccctgggtggctcaatggtttagcgcctgcctttggcccagggcatgatcctggagtcccgggatcgagtcccgcatctggcttcctgcatggagcctgcttctccctctgcctgtgtctctgcctctctctgtctctgtatctttcatgaataaataaataaaatattaaaaaaaaagctatcacaaatgctttaaaaacatacctctcaaaaaatggaaagatatctaaccttgggaggacaaggaatacccattaaggttatagtaggtcaagttcaaactaaaacaccatgaatgatacatttgcatcttcccatttcacattctctttattcattcctatgttatcaagtgtactatgctttaatgttaagtcacaggggtccctgggtagctcagattcttggtttcagtttaggtcatgatctcagagttgtgagatcaagctccaagtagggctctgtgctgggcttctgcttaagattctgtctcttcctctgccccctacccttgctcagtgcacactcgggcatgctctgtctctctcaaaaaaataagtcatctctcaatttgtctattcacacttgaattgttgaaaaatagatttcaagttaagatttactttattttcaaaattattttttaaaagattatttatttattcatgagagacacacagaggcagagacataggcagagggagaagcaggctccctgtggggaccccgacgtgggccttgatcccaggaccctgggaccatgacccaagccaagggtagacgctcaatcctgaaccacccaggcgcccctgaaattattttttttatctgtatcatattccattttttggccatcagtgtttgtaggaaaaaatacttatttctgggtgccttgttaaacaactacatttaaaggaataataatgaaataaggtttttaaataagagattatgaaaatgtgttaagtataggagatatttctgtgccttggcattgtaaactgtaagcaatgaacaggctttattttctctcagagttcttagagctattcatagtttataaacaaagtgatggttttccttatatcataatcatttaaaacttagcttatattaattagtgatgaagacaaaagtaaattctaagaaaacagcattctcagcattgcagatggatagtatagcatgactttagccagagcttgtaagatttacagtgtacttgacccattttgttgacatttttgtgatttctcttccttctacacattaaaagtattctctgaagttttagatacttatccatttgttcaacaaattatatgttgaatgctcactgtattctgggcactatgcttgtgactgaaactacaaagatgattaagacaaagctctcagtgggagacaaagataattgcaatgtaaagatgcacaaacagaaatatgtttgaagtttcaagaggtctcatgggagggagctcctggttctacctgggaatgtcaaggaagacctgcctgaagaggggatgattactggagaaagatacaattgccatcgagagagatagacagagagagagagagagagagaaaggtagatgtatgtaggaagtgcctggctgagctgcagggcacttagccagcctgagagattctaggaagctgcttggagatggaccactaaaggttggaggaaagatatggagtaggagagtcttcctaaaagacagagatgttggcttaacttgttcagagaatggcaagtattcataaaggtcaggagacaggattcatgagggagttggtgagggaggatgagggtgatgcaccatgctgaacatttagcaatttattagctcatttaatactcatctaactccatgaaatagttagcattttctccattttgtagaggaggacatttataacagaggacatgtccacaaattttttgatactcttccctttaagatgtataccctaattcctctccccttgattgtgggctagttaatgacttgtttccacttaataaaatatggcaagaagtgatgatttgtgacttttgagactaggtcataaagcattatggcctccttgttgtctcccagatcattcactctggaggaagccagctgccatatgatgaggacacttaagcaaccctgtggagaggcccatatgtcaagaaagtgagccctcttgccagtagtcgttaaggagctgtagcctcctgctatcttccatgtgtgggagccattcagaaaaaagatctagccccagtcatgttttgaggtgatttattatgatttattatgcaacacgagataactaatacagacaaggagtcatcaacatattaaaggtcacataactcataaattacaaatttgaaatttgaacccagaatttgaaattcaaactccagagttgttgcacctaacctatttactatcctgccttgaaacgaaggcggggacctgtctttagagatccagtgcttatatgacacggacacacatgcattcatatatatgcacacactcatttttcctctctgtttctttttcttttatgactctatcttgatagtaataggaaaccactgaaaacaactgggttttagaaagaccctgtggtgtagaggcctaattataagagggcacaactgcagttagaagaatagggtcaggtaatgaaagtaatccagacagggaatggccaggtcttagactaaggcatgagacagaaagggtgtggcaggttcaagaaatgtttagtgggtagagttgaggcactcctctcggtggctgactggatgtctgtggtgctggcctgtgagagggcaggaaggggaagtggagggactttcagaactgagtcagtcatggtgccacagtaggtaggttagggaggggatgttggtggctggtgggagagtaggagaggatcataatgagttctgccttggatatggtgcattgagatgtatctgcacttgagaggtatctgcactggaccagcactactgaggaggtctgagttgaagtggggatttgggggtcaccagcctgcctttagaggatgctgaagtgacagcacagctgactgcactgtgagagagtgtgtgcagtgaggggaagagagcaattactaaggggagagaagaaaggagaaccaagggaaaagatgggcatctgaagagccaaggagaaagggagtaccattaaggtgtcaaatacagccttgttttctgacacttgccactttatatgtctgtggaatgtggccagtgacttctaggcctgctatttgaaagagccccctgctgagaagcttctgcattgtgccctgaggcacatccgaaggctcccagtgaaccttatatgtgcacctggtcttagctcctctacttactgaactcgtttagtttcaacatttatgcagagttaagcatccagtaggcacatactaagtgactgttgggttagtaaatgcttattatacatacaaggcactgggtagagcaaggctttactctttgcatatgtagaagtaataatagaagacctcttgatgagtcccattgactcagataagtagctgcatgcagattttaatgaggatttgatgtgtcctgtagagatacaaaattttatttctctttatttctttgtcattaatgttaattaacaacaataaaaaaagagtcaaagacctgggattccaaaacttttcctgatattttaagattgagtttacagatgcagtttggaaagttaatatggattaagctgagattttttaaaagggcttctttaataacataaaattctttcacctccagctgttctaatggtaacttcctgtccatctgggagtcattatttttaaacgttgtgtttgagttaaatgaaataatgtcagtgcttacacttttttagtaattagatatagtgattattgttctcttttaaaattatgcttggattttcaattaagaaaatagtaagtccataatatagtttcaaaagtccaaaaacttttacagactaaaaaatagtgaatttaaaaaattaaatcctgtggctttcatattaaaggcaaacaaaagtttcccacatatttaaatgattaagacagaaaactttaaccaagctatcaatgctgtagctcttttttttttttaaagattttatttatttattcatgagagacacagagagagagagagagagagaggcagagacacaggcagaaggaggagcaggctccatgcagggagcccgacgcaggattggagcctgatgcaggactcatccatccccaggcctccaggatcacgccccaggccgaaggcaggcgctgaaccgctgagccaaccagggaccccccatgtagctctttatagtatgaaagttctgctataaatctgctggatttattaacggaggatgttcatttatttagtagggcattaaatcctataacataatgctgcttactaagggcttgttttggtttttttgtttgtttgtttgtttgtttgtttgttttaaaactctccaaaagtaaaaagaccaggaagagaaaagagttcagtgggttcatctggaagaaccttccatcccatccaccaacctaaaccttcttacccttaactcctgcactattcctttgtctctgagccctgcccttctcccggtccttcccacctgccttgaatcatgtgctctgatgctgggcgctgaggctttcattctctcattttaagttttttatagttatttcataagtaattagaataggttggtctctacaatttacctttcttttaggctttatctccatttcccacagtggcttaaccagtgatgatcactgaacatcctgtaactagtactgtgatggttagtttttgtgtcactttggccaggctatggcatccagttaagagataaatcaatagaagatgtagttttcctcctaggacttaattaggatcaattctggataggaaacacataccctaataatgcctgactaaatcattttgatgggcctgtcttctctaatatgctttcctaatctaagttttcctctttgccctgggcacagtcagtgggcaagacagaccctatatcttaagttctatgaataagagcttttttgaattgagctaggcttgggaattaaaaccagatatgcttttcagttaattaatttcataacataagagaaaactaagagcttgagtttttaaaaaagttaatgagaagatattgaagtcactgggaacaagcttttctcaaatatgtttccttcagcttaatacattttctaaaaaattaattaagcgaggggtacctgagtggctctgttggttaagcgttggactcttaatggtcatgatcatcatgatcatgactcatcaggtcatgatctcaggatggtgaaattgagtcccacatagagcccataggctcagtggggagtctgcttaagatactctttctctttgggatgcctgggtccctcagtggttgagcatctgcctttgactagagcatgatcctggggtcctgggatggagtcctgcatcgggctccccgcagggagcctgcttccccctctgcctatgtctccgccttttctctatgtatctcatgaataaataaataaaatctttaaaaaaaagtctctctctccgattaaataattaaatttaaagattaatttaaatttaaatattaaataaatctttaaaaaaacaaaagacaaaccaaaactaattaaactagatttagcccatagcaaccttagccttttcttttttctttccttccttccctttttttaaacagagggagacatttgattaaattactgaaaatattcactgaaattcactgaaaatattattcaatggggaaaacccattagatatataaagacagataacattagatagctaattaggaacaaagaattgcataatgtagtacagatagctaagaagaaactctttgttttgaaatacatttttatgcaatgtcatatggtctagttaaaatcactgtcgtggaccttttggtccaaaaatggaagtcctatagtgtatcatttaatgtcttcactttggctgactcactgtcttggcattgtttctgctgcagatatatatagagatggttcatgtcatactttagaagaatgtttttggacaatagagcataaagaacacagttcaggagacttctgaattattagatttttttgaaatagagtttatttaaaggaatatttcatgagcaatgcaaataatttagtttttataaaacaggacaaatattaaattagaatttgatgggggtggggagagttgtgtatgtttatgtgattaacagctgatctccagtcaaaaatccccaagtagtagatattacttctgtaaaaaagaaagctttttttctgttttacttagaaaatttaatgaatcaaattattgccattaaaaaaaactatcattctcatttagaaaccaactaattgtggggcctataatcaagtcagaaagttaataatacagtttattaagacaaatggctaacttaccaattcagtcaataccccttgcttgggaaacccaaatggccctgggaccaaggaagatctccaaaactaaatgtaaaacatctctgatgaaacaaatgttgttgccagacacatttctacaatattttccattattgaccgtacaggaggtgagatgtgatgcaaacgaaagcacttattctctgttattgagagcaacacaggcttctttgggacattttgacaaaggacagagacatacttctttctcactgggtaaagggaatgaatcgtttccttccaaatgagtctgtaccagctgaatgcagaaagcagtcatgtgccagggatgagttctggcctttggcttcctgcttcttccaagtggttttccacctcttaatgtacctaaatggaattcggagaggctgccccctacttcctcccaaagagacagctcctccagtgagtcacacagacacacactctgaggtctcaggcattttctctgctaagcacagacaggattgcattgtaccaacatcccacattgcctacagcttcagcagcctcctccactttctcagagtgtcacagcctagtgctgtagccctgaggaaccagggcatgtgtctggggatcctacagaataggagggaaaatgggtaattgatgcccatttcagatcaagagcaacaggtattttgctgaggctgagcgtataggggggatggaagtgtgtggggtctggatggggtagactggtggagatagtaaatgtctaagatttgggttgcctgcaacagtatgtcaagccttaggtattgctttctaaatcaccactaataatttcttttccattctcccacgagacctcaagtctggtcattaaattttctaactttgagaagattatgaatgtaaagctcaacaactgttggattttatttaccaggatacagttagatgattggattaattgttggtgactttgccagtaactgtgactcctgtgggattgttacttctgaaatgctaatttctttaaatttctaatattactgctgatgtgtgttaaaaattactctgaaaaattatcctaaattttaaaattttaacttaaataatttaaaaattattttgttcgggatccctgggtggctcaggtctaaacaggtttagagcctgcctttggcccaggacgtgatcctggagtcccgggatcaagtcccacatccctgcatggagcctgcttctctccctctgcctgtgtctctacctgtctctctttctctgtgtctcccatgaataaataaataaacaaaatcttttaaaaaatttatttattcatttgtatattttaatttttacaaaagattttatttatttatttgagggagaaagcacaagcagggtgagaagagggagaaggactctctggtgagcagagagccagatgcaggacttgatccctggactctgggatcgtgacctaaactgaaggcagatgctcaactgaatgagccacccaggcatccctcatttatttttttaaggatttatttatttgagagagcttgagcaaggggaggggcagagggagagagagacagagagatagagagaagcagactccctgatgagcagggagcctaatgcagggcctcagtcctaggactcctagatcatgacctgagctgaaatcaagagctagatgttcaaccaactgagccacccaggtactccaagatttatttttattaaaacagtaaagaagactttatccaagactcttgtaataagagcattacatcttaaaaaacaaaaacaaaaaaacaaaaaaccccacagagggcagcccgggtggctcagccctgatcctgggtatggggcatccagtcccatgtcaggctccctgcatggagcctacttctccctttgcctgtgtctctgcctctctgtgtgtctctcatgaataaataaatacaaaatcttaaaaaaaaaaaaaaaaaacattgcagtaggggagagagatggtactcaactccaaatacagtgaagagctggagattaacagccaactaacaaagagaaggggtcagtggataggaaattaccatgaggagacatttgaggatgggggaatttgccaaaccagcttaacaggattcttgccaaaggcaggactaggacacatataaaaggtagcagatgaggaaattgattccagcaaggatgaaggccaaggctgaggcctagtcaagtaaaggtctcagaggagcctgactgaagttcggtcaaggagaatctttgtcatctgtactaaatctggttgttcactgcagaaagaggaatggagagtacagttaatcagagagaggaggaaaagcccttctcagccttgtgattgggaagtcattcacacagggttgccatgtgagggcccagtgcatttcttctgaagggtggccacaaatgctgccagagtaccagcagcatcaacagttgggccagccagagcttacaggccttctgctcactgtggcccaccgcaccaggtccagccaaacaaattgctattaaactagatctaaggattatatttgtgtatggtgtaagaaagtaatttagttcttttgcaatgtagctgtccagtagctggatcactctcttacattttattttttaagattttatttatttattcatgagagacacagagagagaggcagagacacaggtagagggagaagcagcctccatgcagggagccagatgtgggactcgattccgggtctccaggatccaccctgggctgaagtcggcgctaaactgctgagccacgcgggctgcccactctcttacattatacacaaaaataaactcaaaatagattggagacctgaagccataaaactcctagaagaaaacataggcagtaatttctttggcattggccatagataaattttttttatgtctcctcaatcaaaggaaacaaaagcaaaattgaactattgggagtacaccaaaataaaaagcttttgcacagcagaggaaatcattgacaaaaagggagtgtactaaatgggagaggatatttgcaaatgatatatccaataaggggttaatgtctaaaatatttaaagaagctgtacaactcaacaccaaaaaaaaaaaaaaacaaatagtctgattaaaaatgggcagaggacctgaatagatatttttcagagaaagacatccagatggctaaaagacacatgaaacataatcagggaaatgcaaatcacgaccacagtgaccatgactttacaactatcagaatggctagaatcaagacaagaaataacaaatttagcaaagatatggagaaaaaggaaccttttgtattgttggtgggaagtaaattggtacagccactatggaaaacactatgaaagtttctcaaaaaattaaaaatagaattaccctatgatccactaattacattccagggtatttgcacccccagaaaacgaaaacactaatttgaaaagatatatgcacccatatgttcattgtagtattacttacaatagtcaagatatggaagcaacctttgtccatcgaaagatggatggttaatgaagatgtggtatatgcatatatatacatatacatacatataatggagtattacttaaacataaaaaagaatgagaccttaccactttaaacaatttttttttcattttaactctttcattttaactcatttagtggcatgaaagtacattcacattcacactgtccatttgcagaacttttccatcatcccagaatgaaactttatacccataaatacaaactcccaattgccccctccccttcgtccctggaaactattgttttactttctgtctttctgaatttgactactctaggcatttcatacaggtggaatcatacatttgtccttttaggacaggcttgtttcagttagcataatgtcttcaagattcatccatgtgatagcatgtgtcaaaatttccttcctctttagggctgagtaatatcccattatatgtgtataccatattttgtttatacattcatctgttaaatgacacttgagttacttccagcttttggcttttgtgaataatgctgctgtgaacacacatataaaaatatgtttgagttcctgcttttaattcttttggatatatactagaagtggaattcctgaatcatttggtaattatatttttaatttcttgaggaaccatcatactgttttcagctgtgtctgtaccattttacattcccaccagcgatgcacaagagttccaatttctccatatcctcaacatttctctcttctttccctccctccctctctcccttccttccttcctttccttccttctttcctttcctttccttttccttccttccttcctttttcttttcttttcttttcttttcttttcttttcttttcttttcttttcttttcttttcttcttttctttctttctttctttctttctttctttcttcactttctttcatttttctttctttctttcttttctttctccctctcctttgctttcttattttctcttctcttttctttcttttatagtagccatcctgatggatgtgaagtgctatctcattgtggttttgatttgtatttccctgacaatgatgttgagcatctttttatgtgattttttttaaagattttttatttatttattcatattgacacagagagagaatgagaggcagagacacaggcagagggagaagcaggctccatgcagagagcctgacgtgggactcgatccaggggctccaggatcatgccctgggctgcaggtggcgctaaacagctgtgccaccggggctgccctttttatgtgatttttaaaaaagattttatccatttattcatgagaggcagagacacagagagagaagcaggtccccgtggggagcctgatgtaggacttgatcccatgacaccaggatcatgacctgagccaaaggcagacactcaaccactgagccacccaggtgccctctttttatgtaattatatataccatttgtatatctcctttggaaaaatgtctactctagtcctttgcctatttttatctttctaaaaagattatttatttatttattcatgagagacaggcagagggagaagcagtctccatgcagggagacccatgtggcattcgatcctgggacttcaggatcatgccctgggctgaaggcaggtgctaaccactcagccacccagggatccctgtctttgatccattttgagttaatttttatatatgatataaggtatgggagcaattacattcttttgcatatggatattcagttttcccagcaccatttgttgaaggccatcttttccccattgaatggtcttggcattcaattgtcattgagttgtcattgagtttaatcttatactgtgaagaggaaactcttagagttgcattacttttagatgtacatttcacttttttatttatttttatttattattaagattttatttatttattcatgagacacagagagagaggcagagacacaggcacagggagaagcaggctccatgcagggagcccaacatgggactcaatcccaggcctccaggatcacaccccaggcccaaggtggctctaaactgctgagccagccgggctgcccacatttcacttttaaataggttttcaaaaatctatgcatccatcacagtttttcatcagccctttgctagagagtcaatgggggtagtgactttacttctgttagaagtgacaaggctgctcctatgaaggattctccaatgaaggatccttgaggaaacccagacctccctgcatttactttgttggattgagctttcctcctaaaggaatatattcctttagcttaacaaacctttagaattgaagtgcacatgggagaaataaaaacactagtcatttccatgccacttacaacattacattcctcacagttgattaactgagaagaagggaattttaacgtcaactttattgaaggactggagagaagtagagcaagatgggaaaggagcaacactactttaaggaacaggccacattccaagcagggcacgcctgatttggagctaccctggacagcatgaggcattgagtggaagagaaaactgtagcccagaaagggaagtcggagaatctaaagatgaatgttgcctacttcacagctgtgtcagggataggctctggaagtgagcatgagtaatccatagatgtgtgtgcgcataacccagacccatttctttcatgtttattttgaagcaatagcatatgtttctccagacctggcggtatttcttttagttattttctatccaatccttcttttaagggaaaaatgagaagactatggtgctgaaaaacacctaacagaggattttctttctgtgaccatcacctctacctccaacatatacacaaacatacacacactctctcacacacacacatctctccctttaggacttgtcatgattttgtagtgattataatttgagttgattatgcatatttaaatagaaggtgcatttaaaatgtagattaaatcattgacactgggatatctctggtgagtactagatatttttaatagttacattgatacatttcaagaattaggatgggttttttttttaagattttatttattcatgagagacggggtcggggggcaagagacacaggcagagggagaagcaggctctatgcaggagcctgacgtggaacttgatcctggtctccaggatcatgccctaggctgaaggcagcgctaaaccagtgagccacctgggctgcccgaattaggatgtttttaaaattattaaagactgacattctgtgctgtaagcttctttggtcaaaatcatctctactacacagtagagaaaagcagtttcaaaacttggttcagttatctctaatgcactttttattcacaaaggaaaagatatacccagatcacaaagtttgtatgttattaataccttagtagtctaattaatgtggttgcaggaaacttgaccattgctggatgttagtctcagaaaaagtaccactgagaccaaacccatcctttcttatttccctgctaagagttttccctcttatagaactacttctctgtcacttcttggtctttgtactgttttaagagaattgacttgtgacactagagtataccacatatcactctagccaatgcttttttctctaaaaaaatcacacttaactatatttcagaagttaatgagagaggctgtcttgtgatatcatgaggaagctggggtttccactttcgatgatcttttagcatctactctctctctctctctcttttttttaaagttatgttgtccaacttcaggacctcaaatcttgtgactaatttcccctgctgtatgacctgtatagcctgtatgaccagccccttaacatgctactttttaaaaaaaggtatacaataaccaaaaaatatgctttaacacagtagtgccatcttgcttgattagctcatatagttcctttatttacattttgaagaatgcatttttccctgtttggaattattactattatttgaggtaatctctgactaaaataatacaatagctaacaagtttttgagtaggatagaatggaatagaaagcatttttaaccttgggataaggtatttctgacaacatttttcttttaaagattccagtatgatagcatgggaatatgggtatgtccaaactgataaaatcacatacattaaatatgtacagttttttttgtttcaattatattttaactaagctgtttatttaaaaaataataagtttggtggtgcctgtgtggtgcagtcagttaactatctgactcttagtttctgctcaggtcgtgatctcaggagccctatgttgggctccatgctcagcaaggagtctgcttatgactctttctgcctctctctctgcccttctcccctacattctctctctgaaataaatacatctttaaaaaataataataactttgtttctgtcaaataaatataggttcagtcttacccccctcaaaattaaaaagattctaataaatggaaagaggggatccctgggtggctcagcagtttagcgcctgacttggacacagggcgtgatcctggggtcctgggatcaagtcccacttcgggctccctgctcagcgggaagtctgcttctccctccccctctgcctgccattctgcctacttctgctctctctgtcaaataaataaatgaaatatttaaaaatatataaaaataagcaaggcacttggatgactcagttgagcgtctgcctttggtgtgggtcatgatcccagggtcctggaatcaagcactgcatcaggctccctgctcagctgcggggagcagggggagcctgcttctccctctgcttctccccctgcttgtgcacattttctctctctgtcaaataaatacataaaatcttaaaaaaaaaaaaagaaaagaaataagcaatcaacagcctgaaaggagtggcaaaatgtatatataataaaggacttgtatcctgaatatatttatgtgagtgtatgcatatatacatacaaatatacatatatatacacacacacacgtaaagaactatataagaactgtataagcaataataaaaacaatccatttttggcatgcctaggtggctcagttggttaagcatctgacttttttttaagattttatttatttattcatgagagacacagggagagaggggcagagacacaggcagagggagaagcaggctccatgcagggagcccaatgtgggactcgatcccagtactccgggatcacaccctgagctgaaggcaggcactcaactgctgagccacccaggtgtcccaagcatctgactctagattgagcattccatctcacttacttttatctgtttgaattttttacaataaaagtttttaaaaggtttatgaaatacaaaaagttaattggatgggtcatgggttgctcttgttgctgtgcttttcttgagtcatactcaattgtctatattaatggagcagtacaacagtggtttaagatcatgagctttggactcacttattagcttgcatggctttgagaaagttccttggtttctccatagtccagctagctccctttgtgaggctccagtgagatgagttatgtgtaaagtaaagccaagttcttgctcaattaatgttggttattaccactagtgaagggaaaatgtggcagagatcatgttaaaaaaattcttaatttctgttggagtgggactgtggccgtttttggggagtggactcaggggattcacacaggggaagatgtgctgagaggaaatcacacaagtgtgccccacccccttctgcttcaggcttcccctgacaatcaacacctagactttatctccacgagactgtcttcaaatccctaacagaaaacaagaacataggcaatcctgaaatctttttatcttgtttgtttgtttttgaatttatacttattttttttttcttttgagggcacctgtctctgggatgtttctcttgggctagtatttaaattggctgttttctaacttcaaaacagctagtggtagggagagaaggctaagatttttggagctaaaaatagcaaaataaataatccccagctgggctaataaaaaagcaagcatgtgaccatattcaatctcaggcctggagtacagttccctctgactttctccccatagcgactgtcaccttcaggatttcacattgttagaggctaatccttttctttgtgactgcaattctttccttcctttattcaaagactacatcagaggcactgggaagtaaggatgagcaaggccctcttagttcttgggttgggacacacttgggaaatagcttatggggacacatgggttgtccaggcaggcctcttcgagaggtcaggagcacagatcctgtcagataggaagggccccacgggtctgtttttcttgctttacatggtgctggttatacatagtgtttgagttttggtgtcattgttctttagaggacctaaatgcaatttgccagaaagagtgggctttgaagacttaattgtggcaatatttctaaatcccttacagaaatcactccaagcaccactatatatttgttttagaaaagcagatttaggcacatctgctcagggtcgaagttctccgcacaccccttaccgtgtctctgagattcccacgcttcagcggtcttgctcgatggggtgatttctctccttcccttcagacctcccctgaggacgtgctcacatgctcatgtctgtttctggccctctccctcctctcctgaaatgtaaggagcatcttttaaaatggaaattggccttcctgtgggtcttccatgacatcttgtttttggaagcttcgatgtactcctttatcttgtatttttgtaaagcttttttgttactttctcatcattgttcctccactgctttttaataacacaagaattgatgctaattaaagttatagccaacacatcacatgtgcatattattgtctggtttcttcaggatgattttcagtagtttgtcttcctcacattctggtttcccggtctgtacttctgaaacagttggcttgatttagcttcacttgagtaagtcaaacatgtactaaattacctcacagaactctgagtattttaatcagtttcttaaaaaaaaaaaattcctcttttaaggaaaaactacttaaggattaaatatttaaaaatttttagggattaaatgttttcaaatgttttcgtaaatacttattgaacacctgctattaggattgggattttctcactgacctggatccttgtttccaatcctcctgccttcctgccctcctcctgcacttctctccacatccttcaaagcctgtcctctggggtccccctagtcaggcagttgtctggggttgctctgccccccagcactctgactcgtgagcagttatcacctctatcactctcttggcagttaagtcgtaaacttctcgtgcacttgtgctgtctcacatgagtagaagagtcttttgggccccgaatcacttaatatatttttctccttctgagtattcaaaatattagatttattaaaaaggtaacagctccttgcttctactgctccatcttcagcaacctactttggttttcagctctacagaagcatttctttcctttctcaaaagaacagtcgaccatgcagctttacctgcctcactgagggatacatctgactgtatagatctcttagaactaaaatgagctgactgcctccagtaatttgtgacctcgtacttggagacggaactcaattaattatgtgccaaacagttattctacatatctcccctcccccacccgcttttaaaaatagttgcctaacagattgcagaagactgtgccctgggcttttctggaacacagcttcttagtgttatttcttagaatataaatcaaggacaaggtttataatcaaatctcataggtttagaagtcatttttgtttagagatcaacatggtttgatctcaagcagttcttgggactagaggaaacattgtcaattcatgttgtttgccttaaaaaaaaaaaagcaaacaaaacttgaaggtctgcattccagatttgtcttaaccagtgacaattaatgaaaacatctgtccagttccctctttaaagatcttcagaggaggaattctgggcatgtgaagaatcaagttgacagtgcagacctccatctatagcacagcaaggtctgggcgggggcatggcagggagcttagttctggcttcctgctaagaaatcagtagacggcatttactcttcgttttgtggtggttttccacaaaatttataagaaagcaaaaggaagtttctaaactactgccagatggcaagtacgtggagctctgaagcaaggctaaaacccaatcaaaaaaagaaaaaacacatttaggacaagacagttgggccttttttgagaatacctgaaattgaagcatttgcaaaacttgtgtgaagacataggcagagtgtttatacaaaataatttcttgagtggagatttaggaatcaaagtcaaacatgagtgacaaagatgacctcaaaatggtctcctaatttctgcctattctctgctcttgttagctgtatttctttcctgttcaggctatttttgaagagctggcttccttttccccacctttggtacagatcaactgttgctgtaccccctgccctaccccaggacgaatggtggcttttcaaaatgtccgttgtaggaaaacaaaacctgtatatattaaggtcttgtttcatctgtgatatggtgtcttttccattctcactgaagctgccctgaattagctttactgactttttcaaaaaacgcctaacagttctacctacccgtaatcactccttgctctggtactttctgtatgaaccaggaacattttcaaaacaaaacagactcctggtattttcgagattgtcctgctacatagcagtggtgtttatcaacatttcccattctgttgatttcatgctcatacattaataaggcactttcaaatcacaaaagcttaatttcttgagaatcgtatcttgttcagtattcctgtctcataaagtcagcctctatagaaggcacattctcaagtacaggaatacattttatactcaaccagacagcaagcaagagaaggtgtcaggtaagttccttggttcctctgctgtgacttggatggtttaataagatttgggttgacatctccacgattgcttgagtaacaacaatgctgtcatttgtatcctgaccagagccttgcgcttaaagttgattttctagttgaactgatagatctgtttgtcgcttcttacccagtccctcttcttactatctctgcacatttacagaatttaaatggcgtggcctgtgagcatgaaacagaaagccagtggaccacaaggggactgaacccctgacactgggctcattagctccattcttaaactaggacagccaaacagccagttagtgattcacttggcagcagtggccagactcgtgctgatctagtccagaacaggaaagtatgtcagaagcagagggcagctatcaagagccaagaccccctatacccattaggccagtgatttttagcatcacactgtttcacactgaacttcagaatcaccaacaatcttttaataatgcggcttttaccctcccaacagaagaggaaaatatttgccacttatattattttttaatgtttgagaaaacttgaacattttttcaactttaatcatactgtgttctgcagctaaatttttggttcagctttgggttgagattcatccatgttgtgttttggaatttatcccctgttttgattccattttatgactgtattgtaaatcattctactctgattattctatattcgattatttccagttttttgttattataagtagttctgctatgcatattcttgtgcaggtctcctgttctgcacatgcaagagttgctccagggtacatacatacctaggagtagaactgcaggattgtaggatatatcaccaattttaccagatgatgtccaaatgtccactttcctcagtgtcacatatatatgctgtcttctgtcaccttttaagaattttacagtttttcctgtcacatttaagtctgaaattcatttggaattgatgtggactactacacacatgtatgaaggcactggtccaaattcctttgtttcctaaagataatcaccagcaccattcattgggaagtccgtctgtttcgtgatctgcaaggctggctctcagaaattgagggtccatatgtgtgcatgtttgtttctcaagtctctgtttggactttggttaattttacttaccccagtgccaaaattaccctttgagtacagtgtgatatgacttcttgccatctggtgaggttactccccccacctgttggtctttagggagtgttttccaaatgttctttcaaagagttagctgaatttataattaggccaggaagatcgaaacaaagtttagatattttgatcagtaaacctgaaagtaaatgtgttttacctgaattttatttggtcataaaaataaaacaaaatttagatttgagatgagaatttgtgctcataaaaagcattttctttattgtgcagtatctgcaaaccatattaatacaggtatgtcaaacttgtttggattggttgtgctgtttgtatcacaaatttaattaacattggccttggaccacttccctgagcagtaatacagataatgcctggccaatgaagccacatgagactctaactagatttcatgaaataaagggtctcaaattattttaagtgcttataatttttagtaatatgcaggcctatgcacaaataccaaaagggaaactcaactaagagtgcatgtgtgctggtgtttactaagggaatagagaattttaatgtacacattcagcctgggaaactttgtattgtttattaaataaaccagagaaagcaagagaggaatcagcacagtgggaaataaggtcagcagataaggcttttttttgctactctgtttcctgttctgggtggctctgcagtccactctgagaatttcattccttttacccagattgaaaatttcccatttcctgtcgctctctaccacctcccccattcttgagctgccaaaccaaagcagttcaaacagataaagacacagctaatttgttgaagagcacagagctttcggtaaacagcttcttcctggatattactgtgtagagatgacccgacccttatcagcagatttaagaattgaccaagttattatcgtaccatatctgatgggtctgtgctcagcagggcaactcctccttgccttcttcacaacaaaaagaaggaatgactacaatagctgcaaaaatgctttattggggggtggcaggattttttttaatccgtctacatgtttggaataaagcagagcagatgatagctgggtagggttatgcacgtaggaaaggctcctgtgagtatcagtgacggttctggcacaaagagctgaattcagaaagccctgttctcttatgaattatcaaattggtgaagatgttgccatgttttaagtgattagtctaaaactagctagaccccgtcaaacttgactatattgactatacagggtagaaacagttatgaaaggaataggataggaaagtgtcttaggggatcaaagaagttttgagtttaaaaacctagcatttcactgggaaatcactatgctcaatgtaggtggagtattgggtacttaaacattttcaattctgtggtatttttttccggataaattacagtcagaaaccgaggttggtctgatcctaccacataactaactggtaactaattaaaagcacttgagtaacactttttttttgaagtacagttgacagtgttacattagcttcaggtgtacaacagagtgatttggccaagtcttacattcttgccatcctcaccacaagcgcagctgccatctgccccctcacagcactattacaacccctgtgctgcaccctttgcccccaagattcatcctgtaactggaggcctggatctcccactccccttcatccgtccctttatcctcctctcctctggcaaccatcagtttgttctctgtacttaagggtctgtttctgcttgtttattcatttcctttgtttttttagattccacatgtgagtcatatgatacttgtctttctcaggctgatttatttcacttagcataatatcctctaggtctgtccatgctgttgcaaatggtaagatgtgtcatccttttttgtggctcactgaataactccattgtgtgtatgtgtatacacaccacatctttatccatttgtctattgatgggtactttggttgcttctgtatcttggctgttgtaaataatgctgcaataaacataagggtggatatatctttttagaattaatgtttttgttttctttgggtaaatacccagtagtggatttactggatcatatgggatttctatttaaaaaattcttaaggaccctccagtttgcattcccactaacagtgcatgaggattcctttctctccaaatcctcttcaacacttgtttcttgagtttttgagtctaaccactctgacaggtgtgagatgacatctcatagtggttctggtttgcaaagacttttaacataaaaaggaacaaaaactatggtgtacagaacacaaaaagtaaaatctgccacctgttgcttttcggcttgtataagagcagagggtcaagaacagcaagtggcttttcttctacaaagtttgtgtctctaggggatggatatgttaactaactagatggtagaaatcctttcatattatatgcatttaccaaatcaccatgatgtacactttattttttttttaagatttatttaagagagagagagagagagcatgagcaagaggaggagagggagaaggagaaagaatctcaagcagattagcagattccctgctgaacacagagcccaacacagaacttgatctcttgaccctgagatcacaatctgaacagaaattaagaataaaacgcttaactaactgcaccactcaggtgcccctacactttaagtatcttacaatttttttcagttatgccttgataaagctgaaaaagaaaataagttcatgtctctaggtccctgacctttgatgttcaaggttgtgtaaaaaataatttgtaccaagttaaaattactgattaactatagcatcagcaggtctctaacttgctgatttaagataaagaattggaagagagcttggttggtctcctgtccccagtgctttcatgttcatgtgaaactgagagtgtaaacctgaaactgtgtctctcaaggccctggccagggttcttttcatggactgatgtctctgtatagagaccactaccaatggggttcctcaagattcatgcagggtttgtttttaacactactggtacagagaaggaaatctgggttccacttctagtctgccttggtactaattagttatagccatgttgctttgaacaggtcacttggctggagtctcgtctagaaaatgaggatggattgtctaagtctttagatcttgtacatgaacgcactcagcatgtctcttaaagcatagctggtgtgcatgtctgtttcctctatattaaactatgctgaggttgtaaaaattctaagttgtcctaattccttgatttctaaaatagccattattatattcaatgaacatatacgtgttaactgatcctaagtagaaactatgaggctctgggatgcctgggaggctcaggtggttaagcatctgcctttggctcaaggcgtgatcctgggatcgagtcccaacacatcaggctccttgcatggagcctgcttctccctctgcctgtgtgtctctgcctctctctctctctgtgtctctcatgaataaataaaatctaaaaaaaaaaaaaaaaacaactatgaggctcagatccagtcctcaagggagtaatgaattattataagcaataatcataataaggatgattgctcctaagttccaaaaaggaccaaatttagtggctgttcaccggagtaagaaaatttggggctgtgaggaagcttggaagtattcatggaagaactcttgaggtctaaaaacttttttaaagatttgacggggcggcaggggtgaagagcataagcaggagggaagggagggggcagagggagaagcagactcctcactgagcaggaagccttatgtgaggctcaatcccaggaccctggaattatgacctaaactgaaggccgacactcaaccaactgagccacccaggtgcccctctttctaaaattcctaaaatgctagaaaaatgggatttggtacatgtgggagactggaagaaagtctgcaaaatgacatggcgatgagcaagtgcaaatggtcttggagaatgtgggctgggatacagagcatagaagccctcttagctcctgactggagtcatcagagctgacatacagccagtgctatgctggggctaaattagtatcgagattgttaggatggcgggggggggggggggcaaactcagagaaatcagtacagaggctgtgaaacactaaggcactcaggtaagccttcatctcaatatattttagggcttttaaccaagttagtgacctgcatttcaggtgaggaaagggaatatattatttaggttttttgaagtgggaaggagcccttatattttggagtgaggtttgtaggaccagacagagtataaaaagtcatggaaaatgtgatacgcgctttgctttagaggctgtgtcattgtggtgggcacaagaaaaggacagtgacaggtgtcagtgacatcaatgacaaaagtttgcctgagggaaaaagcaacgaagacttggcctgatgaaaagcaagagctaagggagaaaatccagagctgaagttttgtagccaagtgaggatccaatagctcttaacaacaggcagtaaattcacacatgtgagttgaggttttttagaccaggagtcattcattttgagtttaaaacgaattcttcccaagtcaacaatgtcctttcatctgtcatactgtttagattcctaatattcatgcagttcatttttaagtagtagaaaaaagtgaagtggtggaagaacctatcctagagatggagtatattcctgtctgctgacattctggtaccagcaagctgtcctcacaacacaacacgtttccaaaggcaaaagttcatttcttcagttttaattctatgtaaacagtaaagacaagaagtacaaaaagaaacaaataaaatatcttgcttttatttaaaataaaatgcatttatacagtttttaaaccatggattattggacaatactggtaatccacccctcctggcacccttttgggttgtgtgagctaggaattttccaactagcaccaatgcggactgtaacagcacagcggacgagaacatggccagtccaggcattagagttaaggacgctgtggcgaatcatgactataatgaagtcattcttaatttagcaggtatgagatctgcacattaattatatttttaaagcatttaattaatgcaaagatgctacatctaagccatttgctagctgtgagttttttttaaaaaaaactgtacaattttataaaatttgtgtttgtacattagttacacaaaatgcatacttcatagacctttacttcatattgtaatgcaaaagttgcatattttaggcagacagtgaatatgctggtgaatactaaaaatgttgtaatacaatagggtgtaaaaataaaaacagaagacagtatacatacatgcttattcaaagacaaaaataaaccaagccaaacggactgatagcattttccttcaaggtcattccttcaaggtcaaacaatgacattattaagtatcagggacctttcacaggcctgatttacttgggggtgggagtggggggatggagaatcaatggctaccagaagtaggtatttttaaaacacaagatcaaattaaacatacattaaaacacatgcattaaacatgataaatagacttcatatagtttaagccctggatagctttaaagtagatggcttgactttcttggtttggctagattaaatcagtgatgttttgttcccgacttgccccctactttagttttcaattcatgtccctaaggaatgtgtgccatatttgagtccatatattatatcacgagagcagattaacagtcgtgcttgttagtgcacttactaactggtctggtaaggcaaaaaagttttcatgataaaatgataaatttcaagcttactttattaagcagcatataacaaacaacagctttcaaagttaaatattgttatggccatggaatttcatcacacagtgtctctattcacacccaaccactggtaagtttgtagaacatctcttcatctaaactctcattttggtcttttgcacgtgttgagagaaatatgtagccaccaatgaattcatgaaccactttgcaatctacttccgtacaaatgaaggacaatcgtacttcatctgcaaactctaccgtgacctagaatgaagaccaagaactgtcagtccctggaaaactctgtgtggctgggaccagcgaagcttccatgctatttaatgtctcccctctcacaaaatatttgttgagccttgttttttttttttaatcctaaagagtaagtttattaacccctcccccacacctttttagttttcatgttctgaaaaggaagactgaatgcaaggggtttaggtcattctgttcccaatggtctctggttagtctagttatgagaaggtctctcttcaaggcctgggagaaaacttacttcttgcatttaatttaatatttgctctagatatttaacctttaggtatcatgtgtggatacagtagccctcccctaccttatccatgggaaatatatttcaagatccccaatggatgcctgaaaccacggatagtatatatggttcttgtcccttcacacatatacctgtgataaagtttatcaattagatacttcattatttgttattgtaagagattaataactaatagaattacaacaatatataatcaaagttacgtgaatagtctctctctcaacatattttactgtactgtactcatccttgtgataatgagaaatgataaaatgcccacgtgatggatgaaggtgaaggacgcaggcactgtgacatagtgttaggctactacagaccttctagcaatatgtcaggaggaggatgggttatctgcatctcgaccatggttatccacagataagaagggatactagtatatttcagaaataggagattctgtgcagtaataggaactgatacaataatcctaatgatcctacaataacacatggcttatcagtaaaagatggtttattttaaatgattttcattgtactccaaggctaggggcagcatgatatacagtagtagctgtgccaggttttagacctctgagcatcagtctaaatcctgattctgttaactaagtgtgcagtcatggcaatcatggccattaagccattaactttgagtgtcctcatttgtaaagtagggacaatccaaccacctcacaaggccgtggtaagattagaaataaggtacaaatgtaaaaacatctagcatcatgactggcacagagtaggaattcaataaacagtagctgctactgacagggatgtaccactacaggaaaaccaccctctaagcagatcattatgttcttagaattctaataattgggacagttatgaaatggcaagttaagtgggaaataaccaaccatgttttatactttaaaaggtaatggtacaaataatctacagaatttaatagccttttaattcttaatttactaattcttagtagaagggctctacatgcactcaggtaacactgttcaagcttaccatttttatttcccagtttacattccactgtttcatgttactgaagcgccatgttttaattgcatctcctgtgctggcatccatcctaatcagtctgttgtatgcaattccaataagttcttctttttttcctccctgaaacctatagtattaaaaacataaagtttaaaaacaagtgggggatgggaggacatgttgctttgtttttaagatgagctttttaactcttacaaaggatattttcatataagtaaaaagaaatcattttgaatttttaatgcaaaaattacaagtatagaaaataggtttcaatattcttgacattttactgtaaaattgctaatggatctcagtaggtactttaaatgtttaattgaagtagattacataaaaaggcactaattaagatttatacataaatgtttaggagaaccactgaccttgcaataaagtgtgtgatgccaaattctggtaatgactgccaagcttgaataaatctcatcttggcctcaattagactcatctgagctacattctgatgggcctccaagattcttgctgttatctaaacatgattaaacaccacctttaccatcgagacaatattctttcatgggaggatcatgacaaaaagtaaaaaactgaatcacgtgccccaccccacaatcacatattttaagaactagaattaggaaatctctgcagctacttttggaaattttagtataatgatgactcttcaaaataaaccttgatagatttcttcttaatttagtttccatatatccagaaacaaaaggtactattagaggagtatgtaactgccactcttgaggtatattccaagtacacacatatatgtcgctgcttctataaaaggcatgttctaatcctatgaataatgaagttttaaacttagcaccaagacacagtatcagaatgagtacctggaatataaacttctagcaggaatatttattagcacctttaaagtacttgaaaccagcataataattaaaatttttttctaaatgaatcattagaaaagttaacttttaatttaaattacactcactttgggatgactactgccaaaaagagtggaaggaaattaatccataaaaagggattgtggctaaggctttaaatattttatgtatttttttcttttctttttttggtaaatatggagaacttaccaaatctcttatatagcctggctgtagatggcaatgcgaagaaagaaaaaggaagcagaaagaaaaaaaaaggcaatcagaaaaaatggcaatgaagcaaagaaaaagttgcggtaacctgcaaaccaaaattccagccaaaaaccatgcaaaaaaaattactttaggtggaaaccaagcaaagtaaatgcaagcatgaaaatgaaaacaaggaagcagcgattattttccatttagaacactgagaaacacttccacattattttaaactgataagtgttactaaaattatgggtaaattatttgtagggaaaaaaaagagcaaatacccttttccctgttcatttaccagttcttactcgttaggcagaactaatgcttttagtagcaaaatcaaaattaatattcaaaaacctttaatgttttcagattgagtctgatactatgacccatgcatcactgttcagaaataagttgaaggtattcaggaccatacggtttatttgcacaagaaaagcaaacccctcaaattaccatctgttttttgcatcctttttcctggaagggaaaatgaagagatgctatatactacactaggaacaatggctataaatagattatctagttcaatgtatattcacatggataaaacagagacaactcttttctttaaaatgtaaaaattcagcttgggaatcatagtcatataaagatacatacagtgagtttaaataattaataaatagttgcagggatttaaagtagattaaatataacacaatctttattgatgggccctggtaggaatagaggagctcatggcccaaacctctttctactggattcctgaatgccactgtattgtatagtttaacaattactaagcactatatccaacgactggtgcagtgctggacacacaacagcaacgaactctgcctgtcagcacttcttagctgacagtaggaattgtcagggcaatacatggtctctactttctgggaacaaccaatataaatctagtcagagaaaagagcattaaaaaagaatgtgcatttgataagatgccagcatggaagaaaaggctagaagaatccttaaccacggaccacacacatgctgccatcctgcgagttaaagacagtcagatagtcactgtttttgtcctccagagaattttcactatgacaagctagctgagaaatcagggatagagaactatctttttaaagtgaaaactatcatttaaaaggcttctgagaaaacaatccagtacctttgacaactacaccaacagttggcaatcttcagtaacactttgtatttttctttcctgacagcagatagtgtaaatgatatgcttgctaaggtttgaaattgttccttgtctttgaaggcaaatgaatccactttcagaaataaggtttttttttaaatgagtaatttttaaatgaaataactaagaataaaaaaaaaattagtacttgattcactttccctttttaacttacaatctacattccacaaagctccccagggcagcatttcctccattccttactactcccacatcataggactgtgggataaacaatttccatgtagcttacacaacctctgaaacttaaagacaaatacttggtgattaaaacttctgaacatttctagctaagtgatttcagacccatttgataaacattatatttaaagttaagaattagtaaatgttctgggtatttcattggtgccttcagtaatgttttaaaattattctttaacagaaataaaaatgaaactagatagaaatgaaatatttatttgaaaggtcttcttcaccgccccacctcagactgaagcctttgccttttatggcatgatgtttggtgtagcaaatactgggggctatcccaagtgaaattcccctgcaaagaaccttttatgttgtaccgaagaaccattttcctaaatagcaatccttttatggtattaatttccaggaaaggaattctaaacagagtgaacaaaagcagcgaatttcaatgaaaatttaccaaactttgtcacatgtgcaaatcttggtttaggtttttttttttactgttaagaaaagataaactatttctacccttgtaaagtttatttccaaggctggaaagtccattttgacagcaagaagagttgttatagactttgttgagaaatgctggctgcgctttatactacacttaattatataaggaataaaacccaaagcatcctcaccatattcaattccctgaaagaacacaccctgttcacaggatgatttccttaggttttgagtaaatatgctcccaactatcttacctcattatctgtcctattaaatgaaaaatattttttaatgactaatttaaatggactgaaggttacttacatcctattttatgctctgatcactggatatgaaattaagaccatcactaacactaaaaagttttaagaggggaactgaatttaaagtgtatgtacaaaatcataaaaccggaagaaaacagatgaagtaaaatgaatcaaatacctgcttgttcttgtatttttttagatagcgaggggacaccaaacattcaggatttatatcagttgttatctgttctggtattaactgaggatctgggtttaaatgctgcatcttcagaaaggaaagaatattttgaacttccaagttataagaactgtctgccatggtcttgcctttggaggctaatctgcaggctgccatccagtgtgcatactgtttttcctgttgaaaagaaatattgaaatatgatatgtatcacatatcctttgggtttaaaaatctaaggatgactggtcaactctaagtaatcaaagaaaattaaggtttatacttttaatggaaaacttacattgtcacaacgannnnnnnnnnnnnnnnnnnnnnnnnnnnnnnnnnnnnnnnnnnnnnnnnnnnnnnnnnnnnnnnnnnnnnnnnnnnnnnnnnnnnnnnnnnnnnnnnnnnnnnnnnnnnnnnnnnnnggcagcctcatttatgtatcttacatgctgaatttgctgtttgggatctattatgagaaaggaaatttttaccacccataattttgtttgaggcagagcacagagacacatctaatacagtttgtggccctcagaaaacctgattaaaaagagaagggtcctattgaaaggatattaccaaaaaataccacatggcaagtttgatgctgtgtttttttttaaaaaaaaaaagattttaaaaaaaattttaagatttttatttatttgacagagagagtgtgtgccagagagcacaagcaggggaataggaaaaggggagaaacaggctccctgcttagcgggagcctgaggtggaaatcgatccctggatcctgggatcatgacctgagctgaaggtagatgcttaaccaactggaccacccaggtgccctagatttatgtgagaggggtagggtggggtgagagagagcctgaccccacaaccctgagatcatgacccaagatgaaaccaaaagtcagatggatgttcaacctactgagccacccaagtgccctgatactgtgtgaaaagtaaaataaagattgttaagcctccatagcatttatagttgcactggaggtggatagtggccttggagaacagattcagcagatttcagtagccctttgaggatctgagccaaagtaccatgactgagaagtaaataggaaacaaaaaataaataaataaataaataggaaacaaaaatagctttctgatgaacctcgcctgtaacaaggaaggaggaaagagggcagttacagcagagagaggtataagataaaggagaaagggactttgtggtttaagataggagagactccaggaagttaaatgctgatggaaacatcacactagaaataggaagaaagaaatctagtgtccgggagataaagagggtctctgatggagcgaggctcctgggatggcagaaaactcagcccacttggataggagagccttaagagaagaggtgcctccttccactgtgtggaagttgagggaagctagctttctcagctgtcgtggcagagaagctatgtgacctcccttctaatggctttctaagaaaaaagaaatgaagttgtcccctgagattgaatggcatcagaggcctgagaagatctgaaatattgttgagaatgtctaaaaaaacacagaagtactgcaagtgttgaggcccaggttgaagttggagatccatgaatatctagtgaaacctatccactcggttttgtgattttttccccccccttccctcctttgagtgctcagcagcctaatgtaagcaagtaaaagacaggtggttggagtgagccctggttaaggttttggtaaatgtatataatggaaaagacagtgaatctagggaattgaaggttaatacctggtaaatggtgtgcaggctggactccggaaaaggaagaggtgaaaatatgttactaatggggagaaagttgaggggttgtagggagagagtccctcagatagtctgaagagaggaatgaagcttgtgttgctgttaaatttgcatttaacatttcagaggaacagtaattgggttacactgaagtgtagcatgttgccatggaagtaggcagccaagatggcatgcagtgattgttgtctgagatgtagcctaataagtgcctctgcgcctacaccaacacctgacttcccactcactttgcatttccaagctttttgggttttttggcattttactcttttttttcttttttaaagtttatttatttaagcaatttccacattcagcatggggctcaaactcacgaccctaactaagatcaagagtcacagattcctctaattgagtcagccaggcaccacagtactttacttttaaaggtctaattattatggggttgtatcctttaagtccatttggatgattaatgaagtgtgtaaaagatcacatatcttcagacatctctgttttaactttgcaggttaaatgaattgccacacaacttcctgatagtttgtaatacttgaagagaaagttaaatgctgttgctaatatttttaaaagaaagcaaaaagggagagaaagtccaccaaattcatgataggagttgcatctggagagaagaagatctcccatttatcatttaaaatgtttctttaatataatacttcagttttaacatttgtcctatttgtgtggtgggtatgtagaggtctatctttttccttatacaatacactccactatccacttccaatgcggctataaatgctatggaggcttaacaatctttattttacttttctgtggcatttgatgctattgactactgtctttttaaaacaactgttactttagttcccaccatacctcatttccatggtcttcataagcatttgtgtttcccttgcaagctcctcttcctctaatctgtcctataccgcaaacataggtgttctgtagggttctgttcttagctttttcatagtacagacaaccattctaaggctgcagtaagcattaatcctaaaactaataccattagtatcttcagtgcagctttccagctatccagtggcctacaggttatctccaaaagatattccacaggtaccaaaattaaactcatcatctttccacccaaactcaggtcgtctatattctcaacccttttcactcaactgcgcaagccagaaataaattcctccccatcagcctctcccaagtctgtcacccagggtgctgctgaggcttccttagggttctctgagttggcaccctcttccccatttatactcatcacctgaatctgcatcagtcactgctttaaaattactcctctatactatagccaatataaataggatgaatcccatcattttcatgttagtgacttttcagtggcatttcactgctgccagtttaaaaaacaatctccttaacgtttttatcctcttaatttctgccaatttcttctgctattatcactcattttagtagaaatcagattcggcaaccactaagaagtattcatcctcccccttggactctacgttccagcagcacaaaacacccccttggttgttgatgctttctccatacatttctgcacaacagtctctgcctgcctggcttttactaattcactttcccttcgtgaaactctaactctggcattatttcccccacaaagtctatcctgattctctccattgtcactgaacactgataccttgtccctttgctcccccttagacctgttacttttttttcctaagattttatttatttattcatgagagacgcagagagagagacagagacagagacagagatacaggcagagggagaagcaggctcccctcagggagcctgatgcaggacttgatcccagtccccgggatcatgtcctgagccaaaggcagatgctcaactgctgagccacccaagctcctgacctgttactttttaaagtactgttgtccaaattgtaactgtttatcttccctacatgctctaaactcctagagggagtactgtcatctgttcttgctcacgtctctagtatctaggacagttttcagtacaggaattcaatcagtatttactaaactaaattttttataactttatattttagatgtccaaaggccttggagagcatctagtccaacacacttatttcttagaaaaagatactgaggtccaaagaagctatttttctaaaatcatagggcttgtttaatagcagagcagaatctaggccatttgattttaagactggtgttatcttcattagtgtgatgtgctggaaaagtgctcttttgggagaacctggtagaggcagcatgtgtaagccattctccataccaggacttgacttcacacagggagaaggttaaggatgtaacagggacaaagacgacaggggccagaacacagatctagtctacagacagagaggagatcatctggaatggtcctgggcagcttaggagtgaagcaacaacagagctgcaatagagtctaagagtaacaaataatgatggagacccaaaagtcaaacccatgggtcttatgagagaaaggcaggagcctaattaaaactttgaggaaaattacagaattctaacacatgggcatagcagtcttctacccaggacagagacttcccattttttaaaacaacagttcagaggactactgggcagaacacagggtagagatttgaattatttttgttgaaatatactaaaaatatcctaatgtactatgcagaatggaaaattaagactatagatcaaggaaagcacctctgtattttaagcaattaaatgaaattattttgggaaacgtttttgtgaatgaatcaggggcccccttcttgggtacttttgtccaaatatggatatttttagttagaaagacttactgctttaacatataatcataaatgtacatgcaaaatgtagcccaaaggagaaatgggccgggccgataggaattaactccctgaatacagccctcaaaactggcctgctaaagaagtgcaatctttgctaccctagagaggctggaaacaggaggctgcccctgcagctccacagcccagaagcaccttgctcctttctcaattctgtctctccagccccttaacataattggaaattcaagtttcacatgaatgtatctgattggaatcaaaatctcactggaaatgagtccagaaaatgtattttagttttctggcctttgctgtaaagagtgtggaacagtgagatgccaaactactgcatcctcccccggacacactcgtgccaaaggtgtggtgagtgcagttcttatgtcaagtaagccaggtagccaggtactttttagtgaatatgtccacaagtgaagggctcatcaacgatctgcaagaccctgcagaaaaatcatggcaggaggcagcaagatgttctccagcggcagaagaaccagtccaacctgggtaggaaattcgccttctacctgaaccactacatcaatcaggtaagggaggtgaagaagcagtatgaagaactaaagaagtcacccaaatagcaaataaagttggggggggcggggggagggacgacgaccaaagccagtagctctgagctcccagccggtgttagtccagaccacaggaagcaagcctgctaaaatggagtagaaacatgtccaataacatgtgcctcaaataccagatcctagtgatagcactagatttgaagagacaagaggaaaccaatgagattccggttgtcagctaggaggagcctcagagcagtatcctggggctttcccagaggcgagactgagagctgagtgttgaacaaaaatgtgcagggaagagttatggggtaggggaaaaacttggccaaaccccatagatgcctgctaccccactgttgagccaaaaatgaggctagggaacctgaaggggacaagcttgtcatcagtaaagaaagaggagtacaatgctgatgaggaagggagaagtcagcaaaaacagaggactacaacatggatgagaatgaagaaaacctgaatgctgaaatgctgaagatgagaaaagaggtaccataaatttacctgacaagaaaagtggaatcacttcaaatgaggactgcacaaagagtttacaacaaaatattcatgtgaaattgaatacccaaaattgtgacaaaaactacttataaaaagaagaagaagaagaaaagaagaatctagacctaaaatagaacctaaagaagcaatgaatctgctaaaaaactaccctggcccaccacagtgaagtttatcaatgatcagccaacagaaattactccatcaacactgctcattccaaggctttccttacctctcaggttcatctgatgagctggtgtgccactggattcttctttgctcttatagcaagaaatagatgtatctttaaaggtgcaccaatattgcttgtaaccttttagagttagcttttttggcctacatgtcaaatagaattaacagaaaaataacttttgaaataactttatcaataggattagcagccaagtttcacaacagcgaaagtctaaggccaagttttacacatgctgagctccgttcccttgggccagcatgttatattcaatgttgctgttaatggatttgcgccttctcgaacaatctactcaggaatacctcacaaagaatgaatgggcaggggagaaagacagaaggaccagaattcgagtatttctgttagtgttggcatctctatcactagcaggtcacatggaaaggacaagaaaaggtgaagtaaatgtcaccaatgggaaggctcctaggtcctgtaatccaccagtaggttcttgggtgtgtgcagggctgcctctggggcctctctggacaggcaggtgtacctagcataactaaagtgaggaaaatacttgtctctctcagggtgtatctggtgtttcaacttgccacaccaaagccaaacacaaagaaaacagaatagtcacgatggagtatggataaggaaggatgtgtaacgggagaatggggtagggagcagcatctgaaatcatgccctgatctcagaaactgttctctatggtgagctattctatgtttagctacagtaaagggtttattccataatggctttacatcttatattccatatcacatcctgtcctctttaccctctctgctttaatgcccaactctcttgattctgtggactgtgcctagattgataaaagtctagataagatacactcataaaatgttccatgatcaaatgaataaaatgcaatagaatccggggctttgaacaaggaaataaccactggcaataatggttcattatgtcctgctttcacccagaggggatgctttgtactgaaatgccactgtatgtctcagaatctacacaatgcaatctaggctatactgtctttgtttttcccttttaagaaaaatgtttattagaaaaaaacaagttcatgagtactacagttttaatttggtaaagatagttattttctctcaatttagtgtttctctaactgataaatgcttgtagagatgcattgctaatcttacagtaaatttcaacaatgtgaacattactataaaattaatatttatcattcattaatatttggaatccctcccctttttgtacttacttaaaaactttaatatagtcagcaagttcaggaatagaagtgatgtcaccctaaggaaagaaatcattttttcctgatttttcttgaaatttgaagctctaatatatagtatctgattatcaagtatgagcttattcaataaacaaaattacataaaatacagattatgaaggttttttttaatgaaggttttaaaggtagaatcattatatggttatacgtacggtcattttcaaatgacataaaaagctaataaaaattttgatcaaaatagcagttcatataacctttaagaacatattattgattctaattcagctagaactgtttgtatctgcatatgaaattatgcaaaatcataacagccctaagtgtttcttctgtaataactaatttctaagttttatttttatttttttaaagatttatttatttatttatttatttatttatttatgaatgatagacatagagagaaagagagagagagaggcagagacacaggaggagggagaagcaggctccatgccaggagcccgacgtggactcgatcccaggactccaggcttgtgccccgggccagaggcaggcgctaaactgctgagccacccagggatctcctaatttctaagttttaaaaccaaacttagtatttaaaaattttcccaagatatatttttctcttccttttgtagctcactacaaatgtgcagctcactaatggattttaccatgacttgagactacctttcactctgcaaaaatgtcttcccactgcttatgacagaatgggcagatatcacaagatttatctttgctgtactagaagcactgcagactagaacaatattaattttataattttccataaagtttctgaaaagccaacacctgtattctgtaaagcttgaaatatttctctatatccacccaatacttataagaacctatatccacaaaaagataagcatcaattcaaactatactagcaggaaaaagattcaccctaccaaaattgttgatgtttttcccccttccaaagtgatctccaggtctgaaagggcagcatcaacttcgtccacttctttgtcactgttgttcaaatgattctctgatgtcatgattgacagcttattgatgtgatactgaaaacagaaatgatatttatttaagtgactattctaaatttagtaacattttaaaatgagattactgcctgcatctatattcaacgcttttcatcacttaacttgaaaagagaagtgtccaagaactggaatgataaggaaataaatagcacctgaaatcagtgtccgaaatatcctaatacttatccaaaaggtgtttggacatgtaaatccaagaaaccaagtggggggtggggggcagagacacaggtggaaggagaagcaggctccatgccgggagcctgatgcaggactcaatcctgggtctccaagatcacgccctgggccaaaggctacgctaaactgctgagccaccagggctgcccctgagcagagatttttttatgtgtttttttccctcactgcagtattccctgtgtctaaaacaggtcctgaacccaatgaacactgaatgaattaacagaataggaataaggtcttgtgtaaagatggataacattgattaccttatattactactgttacccagcggaggaaaattagttatcagtattaggctgaaatctaaagctctactctccccaaccccactcctcaactcaattcaatactgaaaataaaatcagaggaaggtgtttatattctcagttacagaagaatggtaagattaggacgcctgggtggctcagcagttaaacatctgccttcggctcaggtcatgatcctggagtcctgagatcgagtcccacatcaggctccctccatggagcctgcttctcctgcctatgtctctgcctctctctatgtccttatgaataaatgccaaaaatcttttttttaaaaaaggaatgataagattaggggttttgggtagttcaacttgggtggctcagtggggagtttgcttctccctttccaaactctgcctctcctcctgctatgcactctctctctcaaatgaacaaaataaataagattgattacatttatatgtggatatacacacataagtatatatttgggtagatacataatgagtagtaatactcctctatgtagatagaaaaatctctgcttttgagtaactagtcatgattttaaatatgcttaggtaagtaagtcacttattacagatctgttagatcttgatggaatgataagcagaatttttaaatcacttaatcagttacctttcaaagcatttagtagcaatccaaatttctgaagcattcattcactgaatacaatttattcataggaaacagtgaactaatttgaggccagttgtcagttttcctctatattttaagatttagtgaattggtaattaatagtctctggctgtaccttcggttatgctaaaatgagatccttacagtgacagaaatttccatgttcacgaatcatggagaatgaagtaggtagaggcccttgggcagttgcctcaaatggcagagtaacattaggaatcatgaagagagttggtgaaaaatacagattcttaagagagatggtgaaaaatagattcttagattcaccccccgagattttgattcagcagatctggggggtccagtccagaatctgtatttttattaagtgactcaggtggctgtgatgcaaaaagtccttagcagttatccaggaggagtaactgggtggcactctcagttaagtgtctgcctttgcctcaggtcatgatcctgggctcctgggatcaagccctgccattgggctccctgcttagcagggaatctgcttctccctccgcctctccccctgcttgtgcttgctcaagcatgcgtgctgtctctcaaataaataaataaaatcttaaaaaaaaaaaaaaagttatcctgaagaaaccctggctatgaatgggactggtcataaaatccagctttgctttcagaggtgcatggggtatctattaaatgttataatacagacttgaacgtaactgcttcaaaacagtgttactaacctatttctttatttacaccttcttagtttatttttttaaagattttatttatttatttttgagagagaagtatgagcaggggcagagagggagaagcagactccctgctgagcggggagcccaaggcagggtttgatcccaggatccagggatcatgacctgaaggcagaagcttaaccgactgacacactcaggtgccctacacaccttaccttaaattacttgtttctttatactatgtagattcatgaaacacaaggaaacagaagccccaaggagaaaataattcagagtgtacggtatgtcggagataaaaatactagacatttccttgccgttttttcaaagtttcccccttctggtactggatgggttcctagagcctttgggacagtctctgggaaggcttctaagaattcagggggtttttggtccagagttctctcattaaatctagattctttttttttttcatttattttttattggtgttcaatttactaacatacagaataacccccagtgcccgtcacccattcactcccaccccccgccctcctccccttctaccacccctagttcgtttcccagagttagcatgcacatgagaaaatgctctgcatcacttgccatcagggaaatacaaatcaaaaccacaatgagataccacctcacaccagtgagaatggggcaaattaacaaggcaggaaacaacaaatgttggagaggatgcggagaaaagggaaccctcttacactgtgaactggtgcagccactctaaatctagattctaaaatggtccccgagacctatgctttgggacattccgtttccacagattaaaattcatgatttctgaggcattttctactgcactaaaatggaacatctgctgtatagtgggtgagggaaagctacaaaataatcccatttctgtgaaaatacaactgtgtgtacattttgactcttggacaacatggggggaggggcgttgattctcctaaaactttactgatagtctactcttgactagaaaccttactgataatataagcaatcaattaacacatattctggggacacctgagtggcccagtggttgggcatctgccttcggctccgggtgtgatcctggggtcccaggatcgggttctgcattgggttccctgcatggagcctgcttcatttactggactatatttacttgagaaaacctgcatgtaagtggacccatacagttcaaacccatgttcaagggtcagctatattctcactcaccaaatttttttgagcacctatgtgccaggcacattcgtatctgttggtattttttaagtgcattacttttataataaaaagataaatactatgtaaaaaatctgagtttcacacacacacacacatatagatgtcacacatgtcatatatgtttcacacacacacatatatatgtgaaactcatatgtatgagtgtatgtgtatacatatatacacatttttttttaagatttatttattcatgagacacagagagaggcagagacacaggcagagggagaagcaggctcttcacagggagcccaatgtggaactcaaaccctggaccagggatcacatcatgtcctcagctgaaggcggatgctcaaccactgagccacgtaggtgtccccccgacatatattttatatgtattattctgtcattggcaaaaccttcactagaaaattataagcccatattctaagtgagaaagatgtaggcagaaagccataaaccaagtgaggtactctgagtaaaattacaccagaactttttttttaaagatcttatttatttattcatgagacacacagattgagagaggcagaaacacaggcagagggtaaagcaggctctacgcagggagcccaacgtgggactcaaacccggtactccgggatcatgccctgggccgaaggcaggtgctaaaccgctgagccacccaggcgaccctactccagaatttaattcaagaaattcttcagatagtctgaattatctagaaacacaacagaagacccttaactagttgattaagcaagtctatctaaactaactcatctatcatgaaagattttccttgtgtaagctttgtttcaattcctttccttcatcatataacagaagaaaggggcttctcttccatcacaaaggacaattttaggagtcttaaacagaaaaccttcctggatgcataaaagcatttagaagattaagagcatttttatttgtgttctaaagagaagaaaataaaatcataaggaaagctttttttctttttttaaagatttttattttatttaagagaaagaacatataaactgggcagaggaaaaagcaggctccccgcagagctgggagcccaatgtagggctcaatcccaggactctgggatcataagccaaaggcagccacttaaccaactgagccacccaggcaccctgatctttttttttttaagatttttattacctaagagagagcgcgcgcgcaagaatgagtggaggtaggggcagatggagagggagaagagggacagagagacagcgggagaaggagaagcaggctccccactgagccgggagccccacacatgggggacccatcccaggaccctacaatcatgacatgaagcagaaggcagatgcttaaccgactgagccacccagacacccccacagtgaaagcttttcataactaaatgtcacctctgcctcctgtacttaaagaacaccaattttgttagaactttacacaaaaccagaattcagaattctaccataatctgagagcattcaccaaagcctcactcaatctaaaatgtaagaatgacttaatctagtggtcaactgcatgcagctcagtgtgtgtctctctctctctcttttttttatttatgatagtcatacagagagagagagagagagagagaggcagagacataggcagagggagaagcaggctccatgcaccggaagcctgacgtgggattcgatcccaggtctccaggatcgcgccctgggccaaaggcaggcgccaaaccgctgcgccacccagggatcccctcagtgtctcttaaatgcggatttgtggatgccaccctatgttattttattagaggacagcagtagtgaagtggacaattttttgtttttaagattttatttatttattcatgagagacacagagagaggcagagacacaggcagagggagcccgacgtgggactctaacccgggtctccaggatcacgccctgggctgaaggcggcactaaaccgctgagccacccgggctgccctggataatttttaaataagcactactgtaattctgaaaaagttgatatgcagttcagaaccacttttggggtaacactggtttaatataaggaaaatattagctacctacttcttaaggattatcattctaaaaacttttttatgtttagtttcactattttatcacctttaaaatgtattatttttgctatagccatttaacaaacattatcatccccagctacttaggaaattatgcaagtaataagcttcattttagaaatgtgattttcaacacagatcccatttctaagggaaaatggggtagtgttaagctactatatatctagaggtaggacaatgtatttctcctataggatacagaaaaatagctgttaagtataccactaacagtacaccaccaccaaactcttagatgagatgacaaaaaaattaaattcatggatttgtctttaagtgtattcagtttccacacagcaaaaagtaaacactatcaaaatactactggaattacaatgctactttatttaaaaataatcccctactctttcccttgaaagtcccatttaccaatactctccactacctgtaaggctgcaaacatcatcatttcttcttctgtgcattcaatttcttctaggagaatagcccatttggcctgctcataaagctgattgattctgattgcatcatactgcagcaaaagagacacaatctttttactacatcacccttaacataaaaatgtttgaaaagtgaatattcactttcaaagcttaacaaaaagttttaatatactttttttctgggatttttatacagtatcaaatgctcaataacaaggatacctatcgggttaggtatatctatatattcccacatctaattttccattaaaaatgacattaaaaatatgccaaaatattattactcagtattagaaataagattctgtatgttattttacagggaaataataattagatattacagagctcttaacaaaatgaatctaacttgagagacatttaaagtaaggtacaagtgactgattttcacttgttattgcaacctgccacactaaaatgttacagtcagggagtaagttacttcagggaacaccctgctcactatggaaaagcatacttagacaaagtactaggtccttagtaattatattaagaatctgaaatacagagtacatatatatacttgtggtaaagatttacttatatgttactgaattatccatttagttatgttaataaaaattaatagtaatgtactagcaatactattttagagtggtaacaaaacatatggcatcctcttccctagcaaatataacttacgttcccaaaacagttttggttttactgaaatgagacatgatatggcctgaggggactaagactgttttttgtagttccaaattatacattttaccgttaaagaattacttaagcacataataaaaaatggtaagcatatacattaaaatctatactataatctagacatgaaaaggatgagaagtagccaagagaggttttcacctaagaacgataataaggaagcaaaagatccaaaacaccatgccatatgttttctagggaaaaatactccaagatttcttatcaaatttactcttctcagaaaagcaaagtatttcagtaggacagatgatgcagtcatttgatagtaaaaatatataacaatgtttgcctaactaagtaggaagaaatgtagacttagtttttctttgaagcaacatcttgtgatttataattagaaatttgaaagtcattgaaaaggtactatttcagaaacacttttttttccagaaactcttattttactaaaatcacagcttaaagagagacttaaaaaaaaaaatccctaaaactaactttatcaattctatagtaccaagctagtgcatttaaaatacaaatcaaccaaaaattcaattattttaacaaaaaagaaaaagtttaattatgttcccaacctaggaacacaatacttatttcaaatacagatgcctttgtctaaagcttgggtttgtaatattattcagatgttctatatacaaatgattacttaccccatcaattctaaaaaacaaacatccaaatgaaccaaaaaaaaaagagatccctctaaaccctcggtacctttggattcaaatcaaaaaagctgtaatacttgaatcggagaagcaaggcctcattttccttcacatcttgttccataagagatcttgaggaatcaagccacctggacaaattaacaagagcagtggaatgcaagacaagattaataaaatatttctacctctagttggagaaagaaattcttcagtgtgtctttaattcattaatttttaaaaaatttatttgagagacagcgtgtatacaagcctgatgtggagctcaatcccatgacccaaaagatcatgacccaagctgaaataatgagtcagagcttaaccgattgaaccacacccaggcgtccctcaatgtttctgtattttaaaacttacccttggttgatttttgctttgtcaagaagagcctgaggcttgaacattttcgccagaatttctggtgatgtgattggctgactgacagcaagtataccagggttgccttctgacaaagcactgtcaccaaaccaagcagaagttggtgacaaggggcttccatcatgagcatcgtaagtgggggtcattgttttactgtaaagtcctgggcttgaatatatacttcctaataaataacatgaaaaataggtaataagtatgaatgaagtacagaattttagtttttaataatacatgctatataacgcaaattgtgaaacaagtttcattatggaagagcttagtacattattttacctgtcttgaaaacatgtaaaattaactttaattctacttgtacaacattagaacatataataaataacaaggtcaaaagaatataattacattggcagaaattctggggaaaacagttcaagggaattagaagctaaatgttaagaatatagctgaagcagacagatcaagtttttaattgtggcaaggctcacctttcagagggccaatgtaaagaacatcggtgcctataggaaaggaaagacaggaattcagaaggtaaaggaaaggtaacaacagaagacagaaacgaaatgaaaaggaaaaggaaatggaaaaaagaaaaacagattttcctaatgtgaattataaaccgaagtaaatattttagatgaatttaagagtaaagaatcttaaaaactgtaacataagtttttttgtccaattcaaaaaaatgaagtgctctagtcaagcatccagtgacaaacatatccacgtttatcactctttgaaatccacaccctgttttaagacagcttgatgtaactgaataaatgcacataaactaagaacaattttatgttaacattttctcagttaatagctgaactggttccaacagctttacaaataaactagtaaagcaaacgggaagataaagttttgcaaacaaagatacattttataattaagccccaaaggcaggggtattttatcttccaattcctcagtgttcaacagggacatacatgtagtagaggctacattaattaaaacttgttgacttagtcaactgacaatatatcctccatcattttaaattacaaaaattaaggagactggattaaattaagacttcaaagttcagaataatgttaagtaaaagaaccttccctcgaagtcctaacccttttatgtttgttttcagtcataatttttaaaaagaaaatgtgtaaatggaggatgcaaagagaatgactgttttcccttatctaatttaggaatatgcttaggaatttcccttccactctaacaacccctccatgcaatgataaaaacaattactccatgcaatgacagaaacaattccctatgaaacagaggtagtcatgctagagatttttatagttgtcatgacctagtctaggaagagcacacaaagtaaaaaaaaaaaaatctttctagccacatggtatctcatttgatgtccctatgtgttctcccaatgttattagtcagtaaagcaatttgcagtacctaaacattattaaataagcaacaaagaaagctgtcaattctttattagctttaaagaacattgcgatagtcagtgatatccttaaatgcttgaactttaaaactacaaaggcattttgtgaaagggttacttgggcagcccatactaattaaaagggctgaaaacattactccagcttaagtgggcaaaaaataatcttgctatagtgagtatatatataaataaggaatagaaaaacactatcttccaggcaaaatcttctcattgtatatttcaaagatatagcaaataaatcttttactaggaatgtcagaatactgaaaattcattcctaatttgatggactattcagaattaaaggtagaattgacaattttataaagattctaaaacaaaatatattcccctaaattatacaatatttaatagaatcagccaccccatcaattctctgccttctcaatttcctcgactttgtatattctacacttcacatgtgatcacctcactgctcttattcttaccctgttaggcactccacgataataattcagttagtttttccaacaatcctattattctcattttagaggagcaaactgaggcacagagaggttaaataagttgtccaatgtcaaaagctattaagtttcagagccaagctataaatcagccagtctgattgaagcgatacacaccacctcctgggtaccataacttatttaagccatttccaattggtgtgatttgtttagaattttgtcagctacaccattgctactgcaaatgtgccttccaacaggtatgtttgtacttatttcccaattcaatgctgggacagagggttaatgcattttatattccttctaagtctcagttcagtgacaatcccaactgccttgtgtttctgatcgctcaatttaaaacatatttgaagtagaaagttattaaggataagatgaactaagatacttagttaacaacaaataggagcttgctcaactatatggaaggataacccaaactgcgaggaggggagagtgagttcaacaaagcactacagtcttgggccacctactacaaatcttaaaaaccccatgtaactttagaatctgcctcataacttggttactatggttactaattacattcttattcttttttaaaacagagtgtgaaagtatttaatacattttagaaaatttccatcaaaatatcaatctcctaccatacttaggaaacaaactgcaggtgaattgaaaataacaaatgttgacattacagatgaattaaaacacataaatatgaaataattatataaaagtatataaaaaggaaatatagaagaatttttgtaatagttgtgattttcttaaccaagggtgaaagcccaaaactataaagcaaattacaaatctgactacataaaaaatgtaaaactttagtacagtaaaaatatcacaaaattaaaaactataatatatattactcaactattattcatactagtgtttatcagggcaactaaaaatgtaattctgagatatttttattgacatactggcaaaaatcagtagtgatttacaacatgtattatcagtcagaaggtaggaaaaggggcattttcatgtactgttgatgggagtgtaaaactatcacttttacacttttatggtgtatatttgaacttctgggagactttctggagtatatttgatagaataattaaatactatctaggtaggaaaacagttaaatatacatttcctaaacggaaattttgacactatttatattgaactagggagaccttttattccaacacagaaagatcaccaaaatctactgttcaacggaaaaactcaaattgcagaatatacagtatttactaaactctcattcatgtcataaaaaacataattagacacaaatataaacatatagaaaaggtactcgcaagttgtactccaactgtttacaacagagtttcacagcagcaagggagtaagttgaagtggaatattcacattcagtttagtaggttttctatactattggaattttttataatcagactgtatgaatgtaggacttctataattaaaggattataagatccattaatgttattccaagtgcaaaaacataaattacaaatgtataacagtcctttttttttcaaaaattaaaaaaaaaatttttttaagattttatttatttattcatgagagaaacagagagagagagagagaggcagagacacaagcagagggagaagctggctccgtgcagggagctcgacgtgggactcgatcctggccgggcctccaggatcacgccatgggccgctaaaccactgagccacccaggctgcccattaatttttaaatttatttttatttattgatttttttaagtagggatggaacccaatatggggcttgaactcacaaccctgagagtaagacctgagctgagatcaagagttggacgcttaacccactaagccacccaggagccccaaaaccacgctttcatgaaagacaaaaatgaatgcataattctgtaatatttgaatttttactgtgagcatacttttataattaaagaacagtttacaaaaatgttttcagggagcctggaatgaactacaggaggatcccaactgtaaacgtggggtggagtcagtcaagaggcaaggagaggccagagctaccctgtgcagcccatgcaaagatgtctcccagcctccgggaaggtgcgtggcttggggaaagcaaatcctcaccctgctccttttcaattgagagcattttaggacaagaccagaagaaagcctgtgttccatcaatgaaacaggccctagacagacagacacctgtagttccttagcaaaagatgttaacctatgtctacatatcctgagccttcccaatgggatctcattcccttgtactatgcatcacccagtaccagaaaaagatatttgaaatatgaaaattactcagcctcagaaagactgtctttctgaaaagagggctgagttgtatagaggccgaagaccaagaactgcttttagtcaaaaccagactgaagtgttggaaaatgtctttacagtaaatgctatgagtaatgctggtattaatactggagaagacttcgctcaaaactgaatctagaacaagacagaatccaaatctgtttccaaaatcagcatgcacagctgaaaaaatcccatagagaatcgctgttttcaatggtgaaaacaaatttcaatacaaatctcctggaatagacagaaaactaaacacatgaaatcttacaattacagaatatgaagaagcaatatcaagtgttaaaaatatgttttcttttacgtatataacctgttatcttttttctaaaaatatattgtcaatattataacatggtccctattatatttgggcacttttagttaaaggcctttgccacgtattttaatgaatattttcagaaaaaaagccagctgttttaaagtgagcaaatttaataatttagtttgcttaaaaattttttttaaatgtttttgctgcttaaaaatggcaaactccaaataggaaaaatggcgtcttgcataaatgattttcctgacaatgccaaacaagcaaagtattcattactttctgtattatcttagaacccagaatttttctttgtctaaactgcctttaagatttttaagaaaaatttctaatgagataattttctaattctacttatatagtaaatcctgaaactagtaattcttaagtcagtactatactacaaagttaattgtttcttggaaaaactctttccccagctgatcaggctcatttccctccctcataggtaattagagatttggtattttcctcagtaaagtggtgaagcactcaagggcataccacctgagcacagttgtgaaagcaaggtatttaagaactcctagaatatgtcatattctatgtaagaatttgactaaagtctgagaatcaaaaaaaaaaaaaaaagtctgagaatcaattcattcatgatggttcttgaaagattacattttaaaaaaaaattaaactttgttaaagtataatttatatgctaatattttatcaaatgttccaacgactattcacacagtatttactttaaatataactggagaaatgatattatgtaatggttagtaacaggagtgtgagccagatagacctggatttgaattctagctctgccctctattataaaccttgggcaaattactttttttttttttttttttttttttagagattttacttctttatttgatagaaagagaatgtgggcacatggggaagggctgatggagagggagaagcagactctctgccgagcacagagcctgacttggggctcagtcccaagactctgaaatcatgaacccagctaaaggcagacacttaaccgactgagccacccaggcaccccataaatttcatacttcttgtaaggttctttgcttttaataccaccaaaatcacagggaaaaatgaaaaataaagtatacattaaataacagttatcacttactgagtataactggccatgctcacactgagatgctcacaattcaaaaaggaggaactaacggaaaccaagcctgaagagtatatatttaatcctcaccacacctgcagtagaggaacatttacatttgcgaagcaaggcatctgaaatcatgaaggtatcacatactgagatacctggacctgtatttagggaaacagtatgcatctgatcatgtttttcaatatttggttcaaatattgacttaaggtgctgacaagtcatggaagcatacaaactagatggagtatacatctgtaaatattcaactataatttaaaatttgtccactttactgtatataacacctcaaaaaacaaaaacaaaaacccaccctgcagttacttagtcccatttacactataaactaagtgaaaaagggatggtgtcccctatcagatgccttcagtaacataaatcttcatgtattaattgaatttttaaattaaccctactctatattaaaggcacattgttttattctcctttatcctccgtgtaatcctgaagttccttgaggtctccccccagtcagttggctcaaccggtttattaacatcttgtaactattctttgaccaaaatgttcactgtcaagatcagtctgtctggattgccttttcttaccatcagagtcctagccactgcaactttttaaaagcttaattcacaaactcagttcctcaacctataaagtaaatataccctgtttggaattgttttgtcttccaaattcctgcaatcctactttctgtattttcatttagcacttatatattaccttcttaagtacagtaactgtttttcaattagcctaaaaacttacgaataaggatgtccagtccctgtatatgcccaggactaaagaaccatgtactttaattagtcatctagctacccaaaagacactgcctatgctcctcctggatgccatatgctgagttgggttctgataacaaaaatgtgaaagttctatcatgccgagagctcacaatttattaggtgagaacatgcagtatgatactaaacacagaaaagtctggtcttagaagagaaggatacttaattcaggttgggaaagtaatagaaggaaatctaaggaagcttcttaaaggggcaaagtcttaaaggaaaaaggtggaaagccaaagggaccaacacatgcaaagcatagaggttttaaataacccagagtagtaataatgtcttaaataagtaattgtggttttcacagaatacagaaaaaagaactaaatataaaacactgtccaattttttgcaatacaaagttattgccccccttttaattattcttgagcagagaaccagccttcctttttattgatgcagctattaacagacacttgacatgatgatttgcacacgacagtgcctggtggtgatttcatgattgcaggggaaaaatgctgacggaaagtttttaaaaaatgatcactctcttaaacctatgtaaatcatttgtcaaaaaaacacaatcatatggatatatgcatggttctcacagtatcctttagttagtctaacaaagtctcacctgatccaggagtaataagaggcccctctaattcaagtgcctcatcttcagactggtcatctagctttttcttttttttctttgttggatctctgggttttttcaagagagaaagttcttcagggtgtctgatatctattaaaataaagaagaaagattattttagtagtgtaatggaaaatttaaacactttacacctggcaaatccatccaatataagaattaataatttccttctgtgtatgtttatgttttgccaaatattaatgttactcaaaagactgaagtatggtacttctaaaaataatctaccaaagcgttcaattcatagctttgtagtaagtgtagtaaccgtaaagtagagaaataaccatctgctgggggtactgagaaaatatactagaattcttatatatgtatttgtttttctaaaaccataaaaaattaagatttatatcctagccacagcaactaggcaagaaaaaaataaaaacataccaattggaaaggaagaagtaaaactgctatttacagatgacacaatactatatatagaaaaccttaactactccaataaaaactgttagaactaatcagttaataaaattcaatgaagttgtagaataaaataaattaatatacaaaaacctgttgtgttttattgggggcacttgggtggctcagtctgttaagtgtctgactcttgattttggctcaggtcatgatctcggggtcttgggattgagccccatgtggggctctacagagtctgcttgggattctctcttccctctctttctgctcatgctctaaaataaatataatcttaaaaaaaatactcaacaatattgatcagggaaataaatgcaagttaaaactatgagaaagcattaggtacctgtcagagtagccaacattaataagattgataatagccagtgttggtgaggatgtagaggaactggaactttcatacccagccagtgggaatgggaaatgagacaaattttttaaagtttcacaggttcttataaagttaaacatatacaactcagccatatcacttctacttacttactcaagaaaataaaagcacattatgtaatagatttactcataaaagccaaaactagggaattactcataaaagccaaaacagggcagcctggctcagtggtttagcgccgccttcagcccagggcgtgatcctggagacctgggatcaagtcccacatcgggcttcctgcatggagcctgcttctccctctgcctgtgtctctgcctctccctctctctgtgtctctcatgaataaataatctttaaaaaaaaaaaagccaaaactagaaataacccaagggtacctgggtggctcagtcaatgaagtgtctgtctttggttcagatcatgatcccagagtcctgtgactgaatcccgcatcaggctccttgctcaatatgaggtctccttctccctctgcccttccgccctgctcatgatctctctctttctctcaagtaaatatataaaatctatatctgagttttttcatctgttaaatgagaatattagtacttcaggaggttgttgtgaaaattaaatgattaatatgggtaacgttccttgaacaaggtctggcataacaagtacttcattaagcgctaagtattaatttttttctaattaaaaaattgcaattatggtagaaatttggaaattatgaaagtataaataattgagtcatttaaaacacattcttgaaaaatggaatatggctatgtaagtaagagattacgttaacagatgtataaaattgcactgcgtaaatgtagcataattcaaccattcttctaatactgagcccattataaataatgattttacaaacatatatctgtgtacatatctctccacattttatttcttcaagaattcattggagtggaattaccagatcaaaagtttataataattttaaggcaaaagtggagcaagatggacatgttttttaaagcttagcttatttgaaaaatagtatatttccttgttttaatttacatttccttatttactagtgatgttgtacatcaagagtttttagccatttatatttccttcactaatttttctattaggtttcttcattttttttcctcttaggtttcttcaagtcagagttaattttcatgtaaattgtatagtagcaaatcacactggatttctattttaaaaaatactattataggagcacctgggtagctcaggcggttaagtgtctgcccctccccctgcttatgctctctccctccctctctctctcccaggttttaaaaataagttcaaaaaaccttttaataactatatggctttttctgtttctctgttggttatttgaattttactattaggaacactcaggtacaggtcaggtttttgttttgtctcattattgcacctattttctgggcaatgtttttctgaaatataaaaacagaattaccagaaaaactgtcctgaacaaacaggttaccagagaacaggtgaacattactgtcctttaattattaataaattttaggtaagtacattttaagtactaagcagcagaaccatgttagaattaaatgcctgctccttaaattctgtccctttctttataaaagcttccaggcatatttgatttcctttttcaaaaaataatttttaaaagattcatttattttagagagagaaaaaaacgagtgggggtggggggaggcagagggagatggggagagaatcccaaacagaatctataaggagggctgagcctcacatggggctcaatcccaggaccctgaaatcctgacctaagccaaaatcaagagtaatctacttaaccaactgagccaacccttgatttctttttaaagttaaaaatagtatagcatattctttatagctaaggttacctaattaaaaatccaagattctcttcattcttttttttttttttaagttttatttatttatttatttgacagagagatcacaagcagggggagcagcaggcagagggagggagaggaagaagtctctctgttcaggggggacctgatgtggagcttaatcccagggtcctgggattgtgacctgagccaaaggcagaggcttaactgaatgaggcacccaggtgcccgattctcttcattcttgtatattccaggtaaaaagaggttaatttacctcaaatgtaatttttgagatttaatgcattagcattaattgctttatgtagattcacaaactcaggagatgtttcaagtatcaagtatatcttttgagccatatttaattaatagaattgaatcatttcctagagtacttttaattttaatttctttaaaatgtttttatttatgagagacacagagagagagagagagagagagaggcaggccgagacacaggcagagggagacacaggctccacgcagggagccctacatgggactcaatcccgggtctccaggatcacgccccgggctaaaggaggcgctaaaccgctgagccacctgggctgccctcctagagtacttttaaaataagatttaacattctaagagacttaatcactgatgagtttcactttcaattctcagtgtaccctcggctttaaatgccatcactaccatgttaggagataagaaaggcattatacaatcccaagcttttgaataatcacaacttcagtatcaagtggtggtagtaacctatctgtccatcccattcatctcctcaaagtaattcatgtgaaaaaatctaaaaaaagtataaagggacatataatgagtcatgcctgagatatggacatgcttttaccacagttcaccacagtcaggtttagtgggagaggggaaagcaagcatgtttcatctgaaaaggcatcccaaatgattctggcatgtcccttctgcttgagaatcactataccacatgattcatcctttgagattttcgttcctaggtcatttcctgtccagctattaatattattagaaggatgaatactgttaagtgtaactagcttttgggtcagtcataagaatgtaaaaaagttcttaaccatatgtgtccatgagaattgcttgtgaagttaaaaataatactaaaaatatatgtttcagtcatacccccatatactctgagtgacttagggcttctaacagcttgttttataaaagctctagtgatggacgacattaagtagatttactgtggggatcatttcacaatgtatacaagtatcaaatcattatttcatatatttgaaactaatatgtcaattatatctcaaaaaaaaaaagctccataggtaattttgattccaacttcttgacaaccagtagcttaatgaaggggtaagtggaggaagaatgacatcttatttctcaaatgataggcacatctacattggaacaaggtagccactctctatacatgaagtctgaataggttttcattataacaaaaaggtaaagtaaatctacacttccacataagacactaattatttcattcataccggaatttaggactgattcactgtgttttgtttcaagaaagaattaaactagtgaatttagaaatgtgaatcgcatgtaaaagtaggtctggtgaagaaaataagtaatttaaactaagtttatatttaacgaaaatacacctggaggactattttaaaatgggtataccaaaataccgtgccttcattcatgctcaattttatacttcaataatataaactagtattatgagtcactacacaaagtaatgatccaggacttctttataacacaaagatatactacatagcaatgaaatgtaatgttcaaaatcagtatgttatcaagtagaagacaaatctagtggaagatggactacataaatgctatatatatatatatatatgtatcaaactatggggagtgaagaaatggggaacagagaagcacagaagggttttcaggtaagataatcagattttatcttgttttttaatttaaattcaattaattaatatatgatttattaagttgcagaagttggagtcagtgattcaccagtctcatataacacccagtgctcatgacatcacatgccctccttaatatccattacccagttacctcatcccctcaccccctcccctctagcaaccctaaatttgtttcctatgattaagagtctctaatggtttgcctccctctctgattttatcttgttttattttttcctcttttctcttctgatcctctgttttgtttcttaaattccacatgagtgagatcgtatgataatggtctttctctgattgaaggataatcagattttagtttaaaaatattttgttaaagattttatttttattttttacacagagagtgcgtgccagagagcacaagcagggggaacagcagaggaagagggagaagcaggctccttgttgagcaaggagcccaacgtggggcttgatcctaagactctgggattaagacctaagccaaaggcagatgcttaactgactgagccacccaggtgccgctaaaaataaattttgtcgtgagaatttctcattaaacatgtatattgaccatgagagactcctaactctggaaaacaaacagagggttgcacaaggggggaggatgggggaatggggtaactgggtgacagatactaaggcccttgatgggatgagcactgggtgttataccatatgctgtcaaatggaatttaaataaaatattttttaaaattaaaggaatctgaaaatctcaaaaaaatgtatattgagcttgtgcatttattttcaatcctctctaaaatcatactaaataaattaataaataaaacatgcacttataaggacaaaaagaatagtaaaaaacatcacataaaaaaaagtcaggggcatctaggtgcctcagttggtttaagtgtctcccttcggctcaggtcatgatcccacagtcctgggattgggctccctgttcagaggggagcatgcttttccctctccccttgtcttccattctgcctacttgtgctttgtcatatagataaataaaaccttaaaaaaaagaaaagaaaagaaaagaaaaattctgggagacaaaagccagagtgggagagtagtaaatgacttaacaaaaggagaaaaataaaatcaagatgtttgcaaaaggaaataccaataggaaacacaatgactcatagtgccaaatatcaagcatgaccaagcactaaaaacagacaaaaatccaaatcctgtcccatattggattaaacctaccccttagatacatgccttttaggatctcttagaggagaatctaagccctacggaacaatcttttagatactgacatttgataaagcttgctcagtgtctaaataccccagagaggggtgacaagctaaacctcattccatgcagaacttcctattgatatttgtagtgctctattattaaatgtatgaatggacaatgattgagagacatctgagaaagggctctgtggtaggtttcacagttctagaggttaactcctttaaatttctgtccccgattatacaatcatacactaatttaggactgctgtgaagagactttgcaaatggaattaaggctactaatcaactgatttaagggagattatcctggatttctccatgggtccaatgtaatcatatgaggtctgccaaacagaagaggaaggcagaagaggtaagcacaagaaagatgagacagaaggagaggtcagatagatgtgaagggagtaataaaaactggacttgctattgctgtttttgaagacggaggaaagaagtcatatgtcaaggaatttgggaggcttctacaaactgagaatgccagaggtctctggcagacaaggtaggagaaactctggccccacagccacatggaaccaaattctacggtgaataattctttctcagacccttcaggaggaacacggttttgctgacaccttactttcagctctataagactaactagagggatccctgggtggcgcagcggtttggcgcctgcctttggcccagggcgcgatcctggagacccgggatcgaatcccacgtcgggctcccggtgcatggagcctgcttctctctctgcctgtgtctctgcctctctctctctctgtgactatcacaaataaataaaaattaaaaaaaaaaaaaaaaagactaactagaacaccaatctgagccacactgtacccagatttttaaactacaggaacagtgagataacgaatttgtattgttttaagctgctaagtttattttattttgtttttttaaagattttattgatttattcatgagacagagagagagagggaggcagagacacaggaagagggagaagcaggctccctgcagggagcccaatgtgggactcgatcctggttctccaagatcaggccctgggctgaaggcagagctaaaccgctgagccatctgggctgcccttaagctgctaagtttatgataaaatttgctatggtagcaatggaatggatgtactgagcttctaacatgaaaaacaccaaatgaaaaggaaaacaacttgggagaaccagagatactgctggaaacagaaaaacaaaacaaaaccttcttaaatacaattctcagaaagtaagatgacatctatgacagacaaataggatgttgtaaacaataactagcaattaacaaagagatatttgaagatacagtgaaaacagttctaaggagtgcctggctcagttggtagagaatgcaactcttgattcagggttataaatttgagcctcagatttggtacggagattacttagaaaaacaaaataaaatcttaaaaaaaacacagttctttttttgtttaagattttatttatctgacagagagagaaagagagcacaaggagggggagcagcaggcagaatgagagggaaaagcagactcccctcggagcagggagcctgatgcagggctcaatccaggactctgagatcataaactaggccgaaggcagatgcttaaccaactgagccacccaggcacccccaaaaaaagttttaagagggaatatatagtattacaaaggcctactcaagaaacaaaaaagaaagtcaaataaaccatctaatcttacacatgaaggaaacagaaaaagaagaataaaccccaaggtgagtagaaggaagaaaataataaagatcagagcagaaataaatgacatagagacaaaaaaaaacacccaaaacataacaaaaatcaatgaaattatgagataaaattgataaacccttagacttaccaaggaaaaaaagagaaaggacccaaataaataaaaccagaaaagaaagtcttgaagtaaaaactggccccacagaaatataaacgactgtaagagaatggcatatgaaaaattatatgccaacaaatagaacccagaaaaaaatagactaatttccagaaaaatactatcttctaaaactgaatcacaaagaaatagaagatctgaacagactactcataattaaattgaataaaaaacctaccaaagtccaggaccagatggattcatgagtaaattctaccatttaaagaagagttaatacctattctcctcaaagtattccaaaaatagaggaggaaagaaaggttccaaatatattctatgagaccagcattacccagataccaaaaccggaaaaagaaaagaagaaaagaaagaaaaaagaaaagaaaagaaaagaaaagaaaaaagaaaagaaaagaaaagagaaaagaaagaaaagaaaagaaaagaaaaaagaaaagaaaagagaaaagagagaaaagaaacgaactacaagccaacatccttgaagaacacagatggaaaaatcctcaacaaaatcttagcaaaccactttcaacaatacattaaaaagatcattcaccagaatcaagtgggatttattctggagatgcaaggatggcttaatattcataaatcaattaacatgatacaccacatcaacaaatggaaggatagagattatataatctcaatcaataccaaaaaagcatttgacaaaattcaacatccattcaggataaaattctctgtaaagtgggtttagagagaacatacctcaacataataaaggccatctatgaaaaacccataactaacaatatactcagtgctaaaaacaaaaaacaaaacaactttacctcttaagaacaagacaccactttatttattttttaagattttatttatttattcatgagagacacagagagaggcagagacacagacagagggagaagcaggctccatgcagggagcccaatgtgggacttgatcccaggactccaagatcatgccctgagccaaaggcagacgcttaaccgctgagctacccagtgtcccaaagacactactttcaatcaacatagtactgaaagtactggaaacagcaatcagaaataagaggcatccatactggtacaaaagaagttaaactgtcactatttgcagatgacatgatactatacattgaaaatcctaatgacttcaccaaatagctactagaagtaatcagtaaaattgtaggatacaaaacacccagaagtcagtagcatttctatatactactaatgaagtagcagcaagagaaacaatgggacagttgttaagaaacaactctgcttataattgcaccaaaaagaataaaatatctaagaacaagcttaatgaaagaattgaaagactgtacaataaaacagataaagaaactgaagatgacacaaatggaaagatattccatgtttagggattaaaagaattaatattgctaaaatgtccatacaacccaaagcaatctacaggttcaatgtaatctctatcaaaataccaaaatcatttttgttttttgttttttttttttaatttttatttatttacttatgatagtcacagagagagagagaggcagagacacaggcagagggagaagcaggctccatgcatcgggagcctgatatgggattcgatcccgggtctccaggatcgcgccctgggccaaaggcaggcgccaaaccgctgcgccacccagggatcccgcaaaatcattttttttaagatttttatttatttattcatgagagacatagaggcagagacacaggcagagggagggagaagcgggctccatgcagggagcccgacgtgggacttgatcctgggcctccaggatcctgccgtgggttgctggcagagctatactgctgagccaccagggctgcccccgacatcattttcacaattactactaaataggacaattactactaaaatttttatgtaactacaaaagaccctgaatagccaaagcagtctttagaaagaaaacaaagctgagggtatcacaattctcaatttcaagatatactacacaaagctgtagtaaataaaacagtatggtactggcataaaaacagatgtactgatcaatggattagaacagagcccagaaataaacccatgcttatatggtgaattaatatgtgacaaaggaagcgaggtaaaacaaaacaaaacaaaacaaaacacacaggaaagacagtctctttaataaatggtgccaggggatgctcagtggttgagcatgatcactggggtcctgagatcaagagtttccccatgggaagcctgcttccccctctgcctgtgtctctgcctctctgtgtctctcgtgaataagtaaataaaatcttttttaaaaaatggtgctggaaaaactggacaaaatattagcaaatcgcataaaaataatgaaaatggattactttctaacaccgtacacacacacaaaaaaaacctcaaaatggattaaagacctaaacatgagacctgaaaccataaaaatcctagaagagaacacagacattctctgagagtgaccacagcagaatttttctaggtatgtctcctgaggcaagggagacaaagcaaaaattaaactgagactacaccaacataaaaagctgttgcacagcaaaggaaaccattaacaaagcaaaaaggcaacctactgaatgggagaagatatttgcaaattatttatcacataaggggttaatatctaaactacataaagagcttatacaactcaacaccaaaaacacaattcaatttaaaaatagattaataggaacacctgggtggctcagtggttaagcgtctgccttcagctcagggcatggtcctggagtccagggattgagtcccacatcgggctccctgcatggagcctgcttctccctctgcctgtgtctctgtctgtctctctctctgtgtttctcatgaataaataaaaccttttaaaaaatagattaatagacattttctcaaagacatataggtggccaaaagacacacagaaagatgctcaaaccactaatcttcaggaaaatcaaaatcaaaatctcaatgaggtatcacctaacacttgggatagaatggctaaaatcaaaaaggcaagtaataagtgttattattagcaaggctgcggagaacaaggaaccctcatgcacttttggtgggaatgtacactggtatacttactgtggaaataaaaatggagttttctcaaaaaaaaaagaaaacaaaactataatatgatccaataattctgctactgggtatttatccaaagaaaatgacaacactaattcaaaaagatacatgcacccttgttaatttgcagcattatttacaatagccaagatatggaagcaacctatgcccagtgacagatgaatatcggatagggaagatatggagtgcatatatataaacatacacatacacaatggaatatatgcagccataaaaaggatgaaatcttccattttcaacaacatgggtagacctacatggtattatgctaagtaaaataggtgagactgagaaagacaaatactgtatgatttcactcatatgtggaatcttaaaagaagaaaaacaaaaagcagaactagatctataaatatttacaaatcatataactaagaagtgattaatatctaaattatagaaagatctcatacaactcaataacaaaagcaaaaacatccaattaaaaatgggtaaaggaatgggatgcctgagtggctcagtggttgagcgtctgcctttggctcagaggtccagggatcaagtcctgcatcgatcctgtgaggaacctgcttctccctctgcctatttctctgcctctctctgtgtgtctgtcatgaataaataaataaaatcttaaaaaaaatgggtaaaggacctgaatagacattttcccaaagaagatacacaaatggtagacagatacatgaaaaagtgttcaacatcactaatcattagagaaatacaaaccaaaaccacaatgcaatgtcacttcatacctgttagaatggctattgtcaaaaagattagtactggcaaggatatggagtaaagggaatccagccacaatggaaaatagaatggaagttcctcagaaaattaaaaatagaactactgtataacccagcaattctacttctggtaatataactgaaggaaatgaaaccactatcatgaagagatatctgcgcctccatgttcttagcattgtttgcaatggctaagaaaaggaagcaacataagtattcactgacagatgaatggataaaaaagttgtgatacacaaacacagatattattcagccataaaaagaaggaaatcctgccatttgtgacaacactgatggaccttgaaggcattatgctaaatgaaataaagtcagagaaagatagatactgtataatctcgcttatatgtggaacacaaaacaaaacaaaaccaaaaaagtaaattcatagaaagagagagcatatttgtggttaccagaggcaggaggtgaggagtggggggaactggatgaaagtggtcaaaggtacacacttaagttataagtaagtactagggatgtgatgtatgacatgaagactatagttaatgctggtatggtatatttgaaagttgttaagagttacaattgcaaggattttgagtgcacgtgtgtgtgtgtgtgtgtgtgtgtgtgtgtgtgtacctatatgagataatggatgttaactttggtgatcattttacagtattacttaagttattatgctgtacaccttaaatgtacaccatgatctcagtacaactagaaaaaaagtgtttggtagaattcaccagtaaaccagtctggccttagtgctgttttggaaggttattaatttattgattcaatttctttaacagatacaggtttactcaggttgtctatttcttatgtgagtttttagaagattggctgtcaggttttttatttagtaaaaattatgttggctcaggtcatgatctgggggccctgggatagaaccccacactaggatccgtactcagtggggaatccccttgtccctccctctcacccctgcttgtgccctctcagaacaaatcaaatctattttaaaaaagagcttatgacatagggcaggggggtaggttaaatagataatgggtattaaggaaaacacttgtgatgagcactatgtgttgtatttaagtgacaaatgactaaattctacacctgaaactaataagtacactttgttaactagaatttaaaacttgaaaaaaaaaaaaaagggcttaaaacataaaaccattttattttatgaataccaacaaactaattctaaggtttttttttttttaatttttatttatttatgatagtcacacagagagagagagagagaggcagagacacaggcagagggagaagcaggctccatgcaccgggagcctgacgtgggattcgatcctgggtctccaggatcgcgccctgcgccaaaggcaggcgccaaaccgctgcgccacccagggatccctaattctaaggtttatatggaaaggcaatacacctagaatagccaacaccatattgaaggagaaaaacaaagttgaaggactgatgctacatgacctcgagacttaatataaagctatcataatcaagacagggtgctgtctagcaaatagatcaatggaacagaatgtagcatccaaaaatagatcaatataattataggcaactgatctttttttttttaagattttatttatttattcatatgagagagagagagagagagagagagagagacgcagagacataggcagagggagaagcaggctccatgcagtgagcccgacatgggatttgattctgggtctccaggatcatgccctgggctgaaggcaggcacttaaccgctgagccacccagaaatcccggcaactgatctttgaccagagagcaaaggcaatacataggagaaaagatactttttcgatacattatgctcgaacaactggacatccccatgtaaaaaaaaagaatctagacccagactttatactcttcacaaaaattaactcaaaaggatcacagtccaaaatgtaaaatgcaaaactataaaacctctagataacacaggaacaaaatctagataatcttgagtttagtgatgagtttttagatatgacaaaaaagacatgatcgataaaagaaataactgataagctagatttcattaaaattaaaatttccgggatccctgggtggcgcagcggtttggcgcctgcctttggcccaggacgcgatcctggagacctgggatcgaatcccacgtcgggctcccggtgcatggagcctgcttctccctctgcctgtctctctgcctctctctctctctgtgactatcataaataaataaaaattttaaaaaaaaaattaaaatttcctgctctctgaaagaaaccgtcagagaatgaaaaaacaagccagagactggaataaaatatttgctaaaggaatatctaataaagtaccattttccaaaatatatactaaaaacttaagaactcttgaaattcaacagtaagaaaacaaactgattaaaaaataggtcaaaagggatgcctggatggctgaaccagttaagcatctaactcttgatctcagctctggtctcaatctcattgtcatgagagcctagttggggggaggggggggggtggttaaggtccaaagaccttaacactctcctcgacaaagatgatgtacccatggcaaatgaacatacaaaaagatgctccacatcctatgttatgaaggaaatacaaattaaaataacaatgaggggcagcccgggtggcgcatcggtttagggccgccttcggcccggggcgtgaccctggggtccagggatagagtcccactccctgtgtcgagcctgcttctccctctgcctctctctctctctctgggtctctcacgaataaataaataaataaaatcttaaaaaaaaaataacaatgaaatgtcactgcacattagaatggccacaaaccaaacactgacaccaccaaatgctggtgaggattcagagcaaaaaagaattctcattcattaccagtatgaatacaaaatggtgcagctactttggaagaccgtttggtggtttcttaaacaactaaatatttttaccatatgatccaacaatcacattccttagtatttacccaaaggagttgaaaacatacccatacaaaaccctccacacagatatttatagtagctttacttatactgcatatcttagaaaaaactacaatacccttggtattggtaggtacataggataaataatctgtggtacatccagacaatgggatattattcagtgctaaagtgaaatgagctatcaagccataagacatgaaggaaactcagatgcatataactatgcaaaagaaacaatctgaagaaactacatactgtatgactccaactgtatgatatcctagaaaaggcaaaactatggagacagtaaagagattaatggttgccaggggttagggaagaaggaaggatgaaaaggcaaagcacagaagatttttagggcagtgaaactgctctatatgatactataatgatggatacatgtcattatgcatttgcccaaacctacagactgtataataccaagagcgaatccaaatgtaagccacggactctagatgatgtgttggtgtcgatttaccaagtgtaccactctagtgtgggatgttgatagtggggaggttgtacatgtgcaaggatagggaataaatgggaactctgtactttctgcttaattttgttgtgaacctaaaactgctctaaaaaaataaagtttatgaactaaaaaaaaaaaaaaagataaatcatataaatgggtaagtcaaaaaagaaccttagatggctaataaagatatagaaacattcttaactttatcagctttgaatgagaaaatatagtatttcattttagaagtaaacactaaaaactgacaacattcaagtgtttgtgatgatttgggacaatggatttttatacattgctggttgtaatgtaaattggtaaagcagtcctcccttatccacgatttccattaattgtagtctggaagcagatgatccttcttttgatgtatcatcagaaggtcagcttaatgctgtgtcacagtgcctatatccttcaccggacttcatctcatgtaggcattttatcatcacacattatcacaagaaggataagtatagtacaataggatattttgagggaaagaccacattcacaagacttttactatagtatattgttataatggacttattttattattgttaatctcttattgtacctgatttataaattaaactttatcacacacacatatatatatatatatgtagaggataaaatacagtacatttactatctgtggtttcaagaatctactgggggtctttgaacatacccctcacatatagcaggggactactgtatagccacttgagaaactcctacatacaaatacaaaactgaaaacaaaaccccacaaagtaatggcactaacataatgtttatggatctaaacagatatggaaaaatgaatgtgcatgttggtgtgttactaatgtatttttaaaagtactagaaggttatatactaacttatgacagtggttgctttgtgaagacaaattataagaatgtgactcaagaactttacctctattattgtgacttaaaaagttttgcaaaatggcagttattaattctaaaataacaggaattaggtaagtttcatataattccttatacttttctgtattttaattttttttcctaaaaattccatcaagcataaaaaaaacactgtaatttcagtcattagatcaaaatagtaatgtcctgcatctcctctaaatctatggaataatagagttatgttctagtaataatgacaatagttcacattctctctgatggccgaatacttcctgtcacatgacataactgggtcagccaaaagtaacccacatttcatttcagaaagcataaacagaattactacaagagtgttcaagttgtagactgcttaaggaaggtaacactcatggtcatttcctttagagctgtgtcaggcctttagtgaaggaagtgacacaatgtgctcaatcactaaagtcaaatagtgacttacctgaaggaaacattacaaaagctacatcctgaaaataatgctttttccttctccttcccgagaaataaattaagtcatcagaatgaagtattatataataatacatacctgatacatttctagcaagaaaagaatctatgttagactcctcctgttccatcttactttaatatttatcttgaagtgatataaaacttccaagaataaagtgaaaaactgacatacacatacatacatagctcaccccagcctactctttgaaataagctcagtgttaatcatcagtcatacatatttcacataactcatagnnnnnnnnnnnnnnnnnnnacagatgtcagaaacagctttgaagactctatcagagaaattcactttcaccttcacatacttcatgttgggaagctgtaggcgaagcagtttgtgctggggggtgaactgaagcttagcatctgcctgaatgccatacttatccaaggtccaatgtgttttaagaagccaagttctcttcttttcccaccagagagcatgatcagaccaatctttttttacatctataaaaacacaagcaatacacaaaacatttaaaaacacttaaaaatcactaagattacttcgaaagaaattatatgataactaaattggatatttaatataagcaactaattaaatattgtcttttatgtgatgagtataaaagaaatactaaagagcagagaaaacattctgtgcccttgaaagcccatacatgaggtagctgacgcagaattattagaacactaataatgcttataccaggtacaatatgggacacagggatgaagagggtcctgagactgagcctgggactccaaggattcccttttccttggttcctccacccccgccctacccgctcctgtgcacattctgtctcaaataaacaaatttttaaaacaaaaacaaaaaaagaaacaaagccttccagggaaagaaaaaaaaaaaaaaaaaaccctggaaaataacatttttggaaacaaaaactactctcatgattctgataaaaagatcattttaatataagttttaaaagccttggtcaactttaaaaaaaaaagagcttaaaagcatatactttttttttttttaacacaacttgtatacctgaaagcctcacacagtaaaaaataaaatttccacatcatgtgcctagaaacaccttcttcaatggtgaaacttaaatcacatgactgaatttctcattgtggaagaaacacaaatggaaaaagtcttcaattaaatccccagacattaaaaaaaattaatcagtaagtaatgggagaattgtagttacttctgactacattgccactttgaaattttaatatttgttttggaaaaacccagtcaattatgtcaattgaagtttaattgtattaatatatataattcctattttataactactcacttaattgtgagacacactgtatgtagtaccctgcatcttttttttttttttttaaagatttcatttatttattcatgagagacccacagagagagagagagaggcagagacacaggcagagggagaagcaggccccacgcagcagggaacctgatgtgggactcgatcccaggtctctagaatcacacctggggctgaaggcggcgccaaaccgctgagccacctgggctgcccagtaccctgcatcttaaattattttccagcacagaatttgtcaattaactttaaatactgaaaatcttatctaacattaaaaaccaccaaggttggaaccttttcatttattgaggtaaatggtcacacacattatataaagggtttacttttcacgaagagagaacccaaaacaggaaaagataactgcaaagaatgaaccaatttgagtaagtctgagctgaactgaattaatggtaggtaggcatatattactttcctccccatacctcagtccattcactcttctgtcctctgtgccaatgtcaaccactaaggaagacctatctccccagtggggggaaaagggaagaaaaagctgtatcctcctcctcctctgtaaacactgatatatcatttggattcccccaaaaggcaaacctgagatgagaactttgaagggaagcacactttgaagggaataggaagtgagacggttacagagaagtgtattaagggttcactgactactgtgtataactgggagttcagtcctgctaaagaccccctgaggaattatgtagaagatgcctaagacttgtcccacctaaggaaacataaggtgaggtatctatctacttccttggttgctcccaaggccattaaattcctactactttctggctgtcaatgcatatagctggccacccttcactcaggcagacccacaaagccccaaatatttgtatcaggacttttacagaaaaacttcatgggtctctgatgaatgaaaatctcaactttccatcaattaggttttgaactctaaactcagaaacagctaactctcctgatcttcctctaaaaatctgaccctccctatcaattccacctcccttcctcacaacaaaggagcagcccacctgcatccagcaagaataaacaagggaatgttatgtttcaaaatcatcactgataattctgaagaactacaggaaacagagtgaaaatgagagatacataaattaatgtgggagtggaaataaaagtccgagtagcaatggttaggcagtgaggaagtagtgataaggaatacagagaacttttcctgagtactttgttacaggaggagcacaataataggatggcagatggacagaaagtggaaagcaaatccaaggagtatttttagggtttttttttccatttttttaaaagattttatttatttattcatgagagacagagagagagacagagacacaggcagagggagaagcaggctcctgcagggagcctgatgggggacttgaccctgggtctccaggatcaggccctgggctgaaggcggcgctaaaccgctgagccaccagcgctgccctaggtttgttttaaagaagagaaagttgaggcagcctgatggctcagaggtttagcgccgccttcagtccacggcctgattacgagacctgggattgagtcccaggtcaggccccccagagggagcccgcttttccctctgcctgtgtctctgcctctctctgtgtgtctctcatgaagaagaagaaagaagaagaaaacaaagaagttattacaagatcattttttaaaagaattacattttttaaaaagatttattttagagagacagcataagtaggggggagaggcaagaggggagtagccaaggaggagagaggggaaatagactcctcactgagtggggcaccccatgcagaaatcagagctcgtgacctgagccaaaaccaagagttggacgcttaaccgactgagcctcccaggtgcccctacaatgtcattttttttttaataggctccatgcccagcctgaactctccaacctgagatcaagagcctagctgagatcaaatccaatgcctaaccaatcgagccacccaagtgctcctttaaaaagtgattggaatgataatataaaactcaaaacgcatttacaattaccatttcttaatttgctcttcagcacagtcattgtgtctgtttcacctcaaaactttttagaaacttgattaagctctcttaaatacacaaaataatgttttctcaccttctagaaaatcttcctttgctgctggctttgtataacactatgtatcctacttcaaaactagtaataccttcacctcaagtaccataactggcttcacccagaatatcacaagaatatagctgttctattcagaagcagcaaaaatgaattttatacactgataaaaatcctgagaaaaacgatgatctaccaattgagaatcactcaacaaggcaagtgtaagagccaattgtacatcaaaaatacttaacaaattttgtatgtatgtgtaaagcagtatatcttaatgcagtaactcttgaaagtacttaggttatctagtatgctacagcacagcttgtctccacagtaataagttaaactatactatgtcaactgtaactgatataaacacaatgtgcacaggagatttcaaatatcaagatatatatttatatattcctccaatcaaagactgagtagaagcataaaaactttgattttaaaagtaaaatggtcatctataaaatcactacaaataaataatgaaaagcaaatgaaaatgctggtgattcataaaataatggcttattttccttatgtggcattacaatttataaagaaagttattgaagttccctacatgtacataatgaaactttagaacaactttccatgtattttactcccacatcaaaatctgaaacccgcacctgttctaataaacatttctaattttttagaatggcagccttagtgtttcaaacatagcattagacaactaaatgcaacacacacactcacacataagaataatcagcctggggcacctgggtgactcagtcaattaagtgactgactcttgattttggctcaggtcatgacttcacggttgtgagatggagccccacgccaggctctcacgggttgtggaggctgcttaagattgcttaagattctctccataccctcactctcaaaacaaaaacaaaaacaaacaacaacaacaacaacaacaaaaccatcagcctggcacttgccatggtaggagttagcaagcatcaccataagggggacttgtttcatcagcattataaaaccattcaaggggtagatcatgctcaacaatatgttctagtagtcaatttttccaaagttaattttcagttatgctccaggtatagtgtaaccaccttcttttatttggtatattgtgactttaaaatattttatctagattttaagaggcaacacactataaatacaaacctcagaaagaaaatctaaggggggaatactataaagtcattttctctcttgcagtagaaaagacatttctttctttattcataaatctagcctttttcagaagtcaagaactatttagattatggttccataaaccaataaaggtcatctataatacttttagtaatatacgtcaatttttcaaaaacactttgccagcactgagtaatgtatagaattattgaatcactatattatatgcctaaaactaccactgtttgttaattatactagaatttataaacttttaaaattaacttaaaaaaattttgctagaattctggaaagaattattgctgtgttcctcccttatttaatagatccaatcatgctgtgctctgttccacataaaagtaacactatctgacactcaaatttacatcattaaaattgcaaatggctaaaacattaactgaatcaataaaaatctctcttgactaacagaatgctcttcaaattcaagaagtagttgagtatttaacctacaaagacaccatttgtgtattctaaggaacaaaacttaagggtttcattattgtgaggctgagtatacaaacattgcttattctaccaaatggcctttggagcattcacctgctccatgactccaggagtcacaaaaaaaaaatcaagtatttcaaaaagctttctgctagggaaaatactatgtccctctttttgcaatgatagcttccttacactctagaaaatataagcacagagaaaggggatacactattaatactctatttaatcttttcctattagggccacaattccttcttaactattttattatgcaattctaaaatgtaattatttactttcattttttaaaaaattttaattgttgggaaaccccggtggcgcagtggtttagcactgcctgcagcccggggtgtgatcctggagacccaggatcgagtcccacatcgggcttcctgcatggagcctgcttctctctctgcctgtgtctctgcctctctttcgctctctctgaataaataaataaatcttaaaaaaatttttttaattgtttaaaaagtaaaaaaatgacaaatagaaagttaaccaaattaacttatttttaagtaccacatttcaaaaataagtaacttattagtaacaatttgaaacaaataggaaacaaaatgttacttttaagtggcttagatttctgttgcatatttaagaaataatattcaggaaggaaggaaatacaaaatttgtttagcattctcataacttcataaaccagaagcaaagtttacattagataatctctggtaagtcaacattttgtattaaattataagtacacagatgctttctgggcacatgccttattttttagtaatatttttctgttgtgctaatatacagtttgtcctgttccgttttattttagcatcctcttaaaactccaaattaggtagtgttaactattgcatgtcaagaattcaccctgtctttaatgatggcaaaaactcttcaatcctagtaagctattaacaaagctactaagcaactggttctgacaccactgcgaactagccatgcaaactgaccagaccagatatcataggccagtgtcctcttgacctccaaaataagactttagaactccatcacaccatttacttattccacctagttactcatctaccaaactcagattttccctcattcatttatttcacaactagattgaaacaatcacaggcacacttccttttatcatgctttgcagatactctgtttttttgttgtaacaaactaaaggttgtggcagcctttgtacctgcatgggtctctgcctttgtcttataataaaagaagtatctatttatctcaaaccaatcctgttaactatgctctgctgccctactcaccttctaggaaccatacacttcttacactggctccctaggtatctcatccattaccgcggctttaaatgtcatctatacattttatctacagtccaaacttctgcttagagtaccagcttatacatcctactgcctatctcatttctccatctagatgtctcacaggcatctcaaacttcatatatccaaaacttaacccaattttctcttatctctactattactaaatagcactaaccatcaacccagttgctcaaaccagattctagaagtaatagatccttcttttcccaccattccccacatttatcagcaatcctttcagtttaacttccaaaaatctccaatttccactagcatgaacccattttgtttaggtcactagcatctcttccactgattactgcaatagcctgactagcctcctgattccattcagcaccttccacacaacatccaaggtgatccacttaacactcatgtcattctcctgatgaaaataacagcttctaaatgcactcaaaatccaaataccttatcgtagtctacaaaggcccacacactatggcccatctactcctctgaatttattttatgctactcttccgtctgcttcaaccacactttccttcttttctccaagaactaataagtaagctctatcttgcctcagtggctttgcacacactattccattctgaatgcaaattctcttatctttctcaaattttagtttaaatttcatattcccagagaagtcgtttttagccaccctaagataaaccttccaattgacctatgtccctctgttattctctatttcagtacactgtgatattgatgatcaaaatttgcattcattgtttgttgttcatgggaggagtgtctttcttcccaattagactatatactctaaaacaaaaacactgtctatttcagtcaccactatattactacacctagcacgatgcctggcatacaatacctgaaaaatgaataaatcctcatattgaaaaatttaacgatccttcattactaccccaagaatgtattgccccaacaggcaaagtatccttaaaacatcaagaaaaataatatgtaaattaattttaaaaatccactttgtcttcaacttcagaagtaaaacatgcttctataacaaccagaagcacaacagagatttcccctagatgtggagaaatcaaactgaattgacttcctcttcttgctcacatcttctaaaaaggatgaattactttgtcgaaggcaatcccttttatgcaaaatgattatattccaaaaattcattttttggtttgaaagttcagatttgccacaaagaaatatcataaacaacagttaggttccaaatcagactgctgcccaaatctaaaatgacccaaagcatattactaacaatattatatcacactaaacaggtatcacaaggttttttggaaaatatatggtcagtgcttcaacacaagatgtaaggaaaactgctagcaatagcacctgcagagtgtgggttagagagggaagaacgagaacacggttattaagttgtaagggagacaagggcttccgtctaactaacggcactgggcatctccctagtcctctttccgcaactccaggaactaacctaccttcttcctctttcccagctgtaatttactgtgttaaggcaaggtttcttacatttactaagctaccgacagtagaagcttttgtttctgctttcctctctatttgctaaaacaaatacacaactcttctaatgtttctaatgagatgtcattgccaataatgtgtaaagacaagatctacaagtaaaattaatgcttaaataggtttattggtttaaaaatgatatctatgatgttatctctaatatttattgaaatttaaggacagcagatcttttttttttttttttttaaggatagcagatcttaatttcaccattcaatcacatattcttttgtcctgaagaactccttactctcacccctttaggtctccttcctctcaaacttttaatttcagaggtaaggatgctgaagatcctcttcccttaattttaggtgtgccttcttgttctggtctctttaattactcagatcttcaaaaagggaaaggggaagtaaaatgaagactgttattcttcaggtacacaatcaataaattaatccataaacattttccaagtacctaccatttgccacactacacttggccactggaatataaaattagcaagtaagaactcccatccaagagacatacatagtccaagtaagggacacagacaagtaaaatgagctaaaaagataaaagaacaaaatgctacagaagcaaccaactttaatgtcaaagaggaatgaggttctaaagatgatgttctacccatcttatgagatgtgggacttccaacatgtgctaagaggaacaaccctataaacaatggagtctccaaatcagattgtgatggaattatggagaatgaattaggaagagtctggcaacaagacatttactgcaatactctggaagcaggacctgacctcaggaagaagctaaagaaaaagagccaaatatgagaaacatgtctaagaatcacaggtcttaacaagattgactatcgatgagaaaagatagctggctgcttctccccctgcctatgtctccgcctctctctctgtgtgtctctcatgaataaataaataaaatttaaaaaaaagaaagaaagaaaagacagctggaaggcgaagagaaaagctagaaagctcctagcttgagaattaaacggacagtgacaaaagcactaagatttgtttatttaacattaaatatatgccaggagcacttaatacactatcatttaattctcccaaaaatcccaagtagagaggtagttccggttccggtgcggggactttcgttcctggtgttcagttgtcgcagttggtgggtagtaactgagccaagatgctgcggaatctgctgactcttcgccagattgcccagacgaccataagtactgtttcacgcaggcagtttgaaaataaagttccagagaaacaaaagctatttcaggaggataatggaataccagtgcatctaaaggatggagtagctgatgccctcctgtatagagccactatgatgcttacagttggtggaacagcatatgccattattagctagctgtggcttcttttcccaagaagcaagattgacttcagttcatctcagcaggcagttggttcagtttcattcagctctctatggaccagtaattgataaactcaatatttattgacttatactaactgccaccaataaagcagtctttaccatgaaaaaaaaaaatcccaagtaataaatactgtttaatccttgtttcgggagatgagaaaaccaaaggacagaggaattatataacctggcccaaggtaaaaaaaaaaaacaaaaaaaaaaaaggctagcatatacagaagtgagactttgaatccagattagtgtgacttccaaactggcatttttgggatacctggatggctcagcagatgagcttctgcctccagctcagggtgtgatcctgatgtctgggatcaagtcccagatttaaactctcctgtttcaacaatctccaagaaatactaatttaaaaacgcaagacacagaatgttgtacatcatgagctcccatcccaattgtgggggaaaaaaggggaggataacacactaaaacctatgctcatatgtgcataaaatatctttgtaaggaaatataagaaacctgtagcagggttgcctctgggagagaagatcaggtgtctggggttgggaggtttacctctttttctactctaagccctttgatattgttctaatttctaccatgcactccatgacttttttttttttttttttaaggctggaaacaaaataagacaaaatggtaatggttgctagtttggggtggaaggaatgtggttttattgtattggttgcaattttctgtagttttaaaaatgaaagttgcaggggcagcccaggtggctcagtggtttagcatggtattcagcccagggcatgatcctggagatccggaatcaagtcttgcatcaggctccatgcctgcttctccctctgcctatgcctctgcctttctatgtgtctctcatgaataaataaataaaatcttaaaaaaaaaaaaaagaattagcatttttttttattttaaagattttattttttatttgagagagcacaagtgatgggaagggcagagagagagagagaaagagaagcagattccctgttgagcatggagaccaacatgtggctcgatatgaggaccccgagatcatgaccagagccaaaggcagatgcttaactgattgagccacccaggcacccttgaagtgacattcttttttttttttttttaagtttttattttaaacacctagtgctcatcacaaatgtactccttaatcctctttacctatttcacccactccacacccacctcccctctggcaaccatcagtttgttccctagagttaagtctgtttcttgaattgtctttcttttcccccattgctcatttgttttgtttcttaaattccacatgaatgaaattatatggtatttgtctttctctgacttatttcactcagcattatagtctctagatccatctatgttgttgcaaatgtcaagattttttatgcttttttacagctgaatattattacattgtgtgtaatatatacacacatatatatatctcacatcttctttatacatccatcaatccatcaattgatagacacttgggctgcttccatatcctggctcttgtaaatagtactgctataaacacagggatgcatacatccctctgaattcatgtttttgtattctttgggtaaatagtgacattcttaaataccactccattaaccaagataaagttattcagaagagaagcaggtttggatatgttaaattgaggacaaaggactaatgttaagattcattcacatttcacagtaaaatcctgatgaccatcctacacattttatataagaaatatgtattaggagtaagatagagtagacatctacagggagataaagaaattattacatacagtgcaggggtgcctaggtggcagagttgcttaagcagccaactcttagtatcagctcaggttgtgatctcagggtcttgagacccatgttggctctgcactcagtgcagagtctgcttaagactctttctccctctccctttgcccctccttctgcatgctcgctctctcttaaaaaatattgataaataaataaacacacacacacaaccaaaacaagaacgggatacctgagtggctcagtcagctaagcatctgacttcagctcatgccatgatttccaggtcctgggatctagcctgtgctcagcagggagtctgcttctccctctgctcctcccacctactcattctctctctctctctcaaataaatagtttaaattaaaaacccttacagtggaaacaccaggtcttgccagagcgaacaatgagaagtgaagtatgcttcacttgatgattttatttcctcccttcccttccttagcacctgcctttcctgcctcagagataagtgacctgtactggtaagagcactattatgtggtagatctcaaaaaatttttgttgttgttaaggaatgttttaaaagactttatttgagacagagagagtgtgcacacacaagccacggaagaggcagagagaagagaaaaagaagcagattccctgctgaggaaggagcccaatgtggagctcaatcccaggaccctgagatcatgacccgagctgaaggcagatacttaaccgaatgagccacccaggcacctcgatttttttaaggtaggttctatgccaaatgtgaggcttgaactcacaaccctgagatcaagagttataagctccatgaattaagccagccagggtgccctgattcaagaaatatcaacggcaaagggctgcagcagagagtaatatactggttagagtttcaacaaattttccattaagtctgacttcaccagatcttactgcaacatgtttaatctgttcctttcccccaccagtatcacagtatcacagggatgctatcaagcttctataaagtaggacctgaaaatgttcttagaaatcaaccccatctaggaactcctgggtggctcagtgtttgagtatctgccttcagctcagggtgtgatcccggggttctgggatcaagtcccacattgggtccccacagggagcctgcttctcctctgcgtctctgtgtgtctgtcgagagagagagagagagagagagaaagagagagagagagagaaagagagagagagagagagagagagaaggagggaaagggaaagaaagagaaagagagaaaaagaaaaagaaaaataaagagaagaaacgaaactcagtctaaattcttcctatagataaggaaatcaggtccattggggttagtggtttgcttgagccccaacaattcctcagtggcagagctaagattaaaattcagttctcacggacacctgaaatgttaactgaatcgatagtcagcatgaaaaaaacgggttcacagactaaatttatgttcattcagctctgcccaaagtaaacatgcttcgcaggcacagaaaaaccttgtccaccaaagagactgctatttcattaggatctccaagagctacactgaaatactcaaacgattccatttctttgttttaatactatccatatactggaatagcaatttattgatatataatggacctcatccctaccatacacttaccagttcattaccaagaagctaatcaattcaagatctatactaagggagacacctgggtggctcagtggttgagcttctgcctgcggttcagggtgtgatcccagactccaggattcataaggagtcccccactgggctccttacagcctgcttctccctctgcctgtgtctctgcctctctctctgtgtttctcatgaataaataaatctttttaaaaaaatatatatatatacacacactaaggaagctaagaaattattccagaaatttatgaactagaccatggaaactgtaattcaagtggtcttaggaggtcctgcctagaaccagccaaaactacacaagtctttcatcatcaagtcattctcccaacaacaaatgtgaatgaagaaatatttaaacaatgcatgtctttaactgataatagcaactacaagcatacctcatttcattgtgcttcgctttactgcattttttataaattgaaagtttatggtaatcttgtgccaagcaagtctatctgtgtcattttccaacagcatttgctcactttcttcctctgtgtcacattttggaaatttttgcattatttcaaaccttctcagtatatttgttatggtgatcagtgagtgacctttgatgttactattgtataattattttggataccacaaaccacacccatatgatggcaaacttaattgataaatatggctggcgtgtgttctaactgctgcctgggcattaccccatctctctcccatttcttagcctccctattccttcagacaaaataatattaaaattaggccaattaataactctattatggcttctacatgttcaagtgaaaggaaaagttgcacatctctcactttaaatcaaaagcctagtgttgaaaactgagataggctgaaagctaggcctcttacaccaacttgtaacgcagaggaaaagttcttgaaaggaaagggctagtccagtgaacacaggaatgatgagacaacaaaacagctttactgctaatatgaagaaagttttaatggtctggacagaagatcaaaccaaccacaacattcccttaagccaaaacctaatccagagcaagaccctaactcttctattctaagaaggttgagagaggtgaggaagctgctgaaaagtctgaagccagcagaggctggttcatgaggtttaggaaagaagctatttccacagcataaagtacaaagtgaagcagcaagtgctgatgtagaagctgtagcaaattacgcaggagatctagccaagatcattaatgaaggtagctacactaaacaaatgtagccaaaacagcctttgtattaaaagatgccttctacaactgccatagctagagagaagccaatgcctggattcaaagcttcacaggagggatctctgggtggctcagcggtttagcccctgcctttggcccagggcgctatcctggagtcccgggatcgagtcccacatcgggctccctgcatggagcctgcttcaccctctgcctgtgtctctgcctctctccctctctgtgtctttcatgaataaataaataaaatcttaaaaacaaaacaaagcttcaaaggacaggcagtctgtcttgttaggggctaatgcagctggtgacttgaagctgaagccaatgcttacttgattactctaaaaaatcctagggcccttaagaattactctactctgcctgtgttctataaatggaaaaacagagcctggaggatagctctctatttacaatgtggtttaatgaatattttaagcccactgtccttctgagtttgggcagactcccattttagcctttgaacttccagtgtcatgaaatatctctgagagttcctttaaaacaattttttttgctggtgttactttctatgagaatcttcatcctttttgtcacatcactttcctcacgtatgtcaataaatctgcctttcactaaatcctttaggctgcatatatattctctccaacggcaacaagtacccactgtcccatggtgagctattttctttaactgttcatctatgtttgattcacttcgggtattttatctttttgtttctttgttgcatatttatctttgttgtccaatttcttctttcaatgatccatttttataaaacagctcatgagtttatcagtgggagacaaagaggcaacacagctacacattttgctacctatgcatgaagtgtgaaacaaatacacaagtaacaaatcacggacagactctgaaataagtgacatgactagtcatgatgcacatctgttatttacataatgagctggggactgaaaaatgagaagttttcacttcatgcaattattcataaagtatggtggtaactaaaatgtaaatcctattgtcggatgctacttaactaaactgtgataactgaaatgtgtatactcaaaaagtgtgcaaagcacacttttggtttccaaaaatctgtcttttattttttaagtcttttattttttttatttttttcttaagattttatttatttattcatagagatgcagagagagagagaggcagagacacaggcagagggagaagcaggctccatgcagagagcccgacgtgggactcgatccagggtctccagatcacgccctgggctgcaggcggcgctaaaccgctgcgccaccagggctgccctgttacagtcttttaaaaatgcttttaatctgtaagcaaatgctgtgtactgcttcaaagtttacatatcattcaaactgccaatatatttcaattaaagtaccccattcagttttaaatttaaaaaattattattttacattaagacttcaatgactgactaaagcagatagaccaaccaattaaagaaaacatttagaacctaaactgataaaagtaacaaattggtgtatctttgatatagctgtagtgactgaaaatttaggaattcactcatcaaaacagtattggggcacctgggtagctcagttgagagtcccaactcttgatttcaccaagtcatgattcagggtaatgagatcaagcccgggacaggctccatgctcactggggagtctgcctgagtttctctctctccctctccttgtgcccctccccctgcttgcactaactctttctaaaaaataaatcttaaataaatcttaaaaaaaaaacccagaatcaattaaacttacaaattgcctcttgaagttatttacaagcccaagagaataatgtttacaatttcaatttgttactttatactgaaaaatatattaacccaaagtagctgagaaattttaccagataacatgcatgcaattacagaatgcccacaaataaaagatataccaattattcatttccagaaggtggataactttctatccaatctggaaggcttactattggttcaacttggcttatttcctacgagatttgactggggagtccatgaaataccaacatctgacaaattctgagagtaacaccagggttgaaatcaccagttagtatctgactctcagaaatactaattggatttgtcttttaaaggtgatgagaggcacctgggtgatgcaatcagttcagtgtccaactcttggttccagcttaggtctaatctcagggtggtgagattgagccccatgttgggctccacagttagcagggagcctgcttcagattctctctctcttactctgcccctccacactgcacacacattgtctttctctctctaaaataaataaatcttaaaaaaaaaaaagagcgggggaagggtgatggggaacctggtggctcagtcagttcagtgtctgccttctgctcaagtcatgatcctggggtcctgagatccagccctgcaccgggctccctgctgagtagactgtctgcttctctttctccctctgccccctccctcgcttgtgctctctctccccccatctcaaataaataaataaaatcttaaaaaaaaaaaaagtaacttagaatatcttattggctttggcattttattttttttatttaagattttatgtatttatttcagagagagagagagagagagagcgcgcgcacgagagagggtaaggtctgagggagaagtagactctccactgagtggggaaccccactcggggctggacctcaggactccaggatcatgaccggaatcgaaagatgaagcccagttgactgagccacccaggtaacctggtttggcattttaaatttatctcagaaagtactgataaatctttttttttttttttttaaagatttataggggatccctgggtggcgcagcagtttggcgcctgcctttggcccagggcgctatcctggagacccgggatcggatcccacatcgggctcccggtgcatggaacctgcttctccctctgcctatgtctctgcctctctctctctctgtgtgtgtgtgtgtgactatcattaaaaaaaaaaaaaaaaaattaaagatttatttatttatttatgatagacatagagagcctgcatgggcaggctccatgcaaggagcccgacgcgggacttgatcccaggtctctaaattcacatcctggactgaaggcggcgctaaaccgctgagccaccggggctgccctcagcacttatttcttaagcctgtcatgtcactggcttccccaagactgctcttccatcatcattagacttctttcagttcctcaaatggccaccctctctcctccacttctcatcctctcctaacctgttgttctttcatcccatgcctttaggctaacatcctctaccactactggttaactcccactccaccttcaactctcagcttaaaagttatttcctccaaaaatccttccctatataccaggtgacattgcccagcaaatactccagtagctatttcaatcatcataacactcatcacactatagcaattacttacttaaagattgtcttgtccctatgactgtaagatgagaataaggaatgagctaattttgtcacttcctgtctctcccattcatagtatactgtctagcattcaggaggttctcatttacaatattaagtgggtgagtgaaggaataatagagaatatcatctcctcactgactgaacttttatctttcctctctataatcttactttctacttctccaagctgttatccaatacatcatgaacagtgcaatcacaatctagaatgcctttcttcctaacttttcactctggccctcttcaaataagactagtcattgctcattcttctaaatttccgtcatcttcctataccacttttttttggcacttcacaaccagactatcaactcaaagcaatcttctgttttcatcttggtatgagaaagctgctcacactttaagcagagactatgcccccattacctaatataaagcttggccctccctaaatgtttgctactgctactcctaatgtggtcaagttcatgaactacttctatccccaaagaagtctcctgctatatacctctataacctatcaaaaatagggcttgagtatatagaattatttttatacaggaatgtttacacacaaatgtcccatctcactctaaagcctttctttcatagtctgagttaaggcatttatttatgcctcaaacccatgagctaaaatacttagtagtgagatattccagaggtccattaggatcctcaatgaaacaattattataactagtacttagtaggtgccaagaactaagtactttacatatacacaatcatttagtcctcacgacaaacctataaagtaaatatattattacccccattttacttgtaaggaaaccaagtcacagcagtgttacataatttggtacaaggtgacaaagcttatagagagtgaagccagtattcaaacccaggcagtctggcttcaggtaatatactcagagagtttggaaccattcaacaaaacttacaaaagcaaaaaaataagaggtttctggttaaatactacataagcacaatgaaaaaaaattagactacttcaatctacaattcaagtttacattttaggtttacacaatatttgaagtataacttaagatagcatttactgagctcttactaagcattctactaattaccagggattctgttaatcgttttaataccatacttagttctcatattaactccaagaaacgggtaagtaaactaaggttaagagagattaaataatcaagttaaataagatgccacagtcacatataactataagtagccatgtcttagactaagttcttaaacactaacaaagtttaccttttaaaggcatttgcctaaaccagaatttttattcattggacataccttcacactagcatagtttatctataattctgtatatattggagcataaaacctattgcttctaaaacattcttgtcatttttcttatagtattaccagtagtgatgcaaggtagcgcaataaagttaaaaaattcattcctaatatggtaagagaacattactatctggcttctttataaaagaaacttcctcaatcttttataaaataccattatttctctagctcagtaaaagggaaaaacttacataccactgaaacagtctggactacaatcatcatcattactacattgacttcatatgtattaagtaatttaattctttaataatatgataaagttactattattatcctcattttacagctgagcaatcagaggcacagacagttaagtcacccagcacaaggttgtatagctagaatatggtaaagtcaggactgtcacaccagtaggctaccccccaccctagtctatgcttcacaagagcattctatcacagcaatagaatgccaatactgtgcataaaactgtaacctgataacagcaatcatttgcttttttccaagttatttttaatttcaaaagttataaaattcaagaattatactaaggaatattaagctgggaggcacttatccaatagacatcttcatctaccatcaataatactggcactttattagatgctttattcacaattctgagtgttccattaagaaaaagatgtctaaatcatcattacatggatactttaaaattataatcaacctttaaaatatctgatacagtttttagttacagcataatataaaaataagataaatatctgagaaatgattcactataaattctaaagcagatttcatctctgagctggaggttgtcagtttcctaaccttgaaaattgtatacaggttgcccaaggaaacacggaaggtagctgctggtccttatacaactagatagtagataatcgagtccaaaaacatgaatcataataagaaaaaatcatgaatcatgaagaaaatccaaatgttaaccttacattttactcattcactgcttatcatcttcttttatatatactaattcacttagaagaattattgaaaagcagaagatatagttttcaaaacagtttaccaggtcactctaggagagtcactacgaataaatagtattcttagtgaagtacaccaggatttgaatgatcctcctatccacaacaagccttcggtagatatatcatctagtttaacgagttaccacatttgaggggcacctgggtacctcagtggttgagtgtctacctttggctcaggtcgtgatcccagggtcctgggatcgagttcctcatcaggctctctgcagggagcctgcttctccctctgcctatgtctctgcctctctctgagtgtctctctgaataaataaacaacatctttaaagcgaaaaagaaaaaaagaaaagaatgataagccatagactagaaggaaatactgcaaaacacgtatctgataaaggacttatatctaaaatatataaagaatacctaaaactcagtaagaaatacaattaaaaaaaaaacaggcagaagatatgaagacatttcagtaaaatgatacacagatggcatacacacatgtgaaaagctccccatcattagtcattaagaaaatgtgaattatagggcgcctgggctcagttggtcaaatgtctgccttcggctcaggtcaggatcccaggctccctgctcagtagggagtttgctcctcccctctccctctgacactcccaccctcccttgtgttcttgcaagcactctttctcaaataaataaatttttttaaaaaaaaatgtgaattaaagccacaatgatacccctacatacttattagactgactaaaattaaaaatataaacaaaaagacctgacaataccaatgctggggaaggacccagagcaactggaactctcaaacttttttttttttcagttctggtacaatactgacaggcatgcaaaataccgtggcccttggaaaagttgacagttttttaataaattttaagcatatacttaggattctatccaggaatcccactcctcaatagttactcaagagaaatgaaaatatatgttcgtgcaaatgttctacagcagccctataaataatctctccaagctggaaacaatacaaatgcccttcaactggtgaatggataatcttggtacacatccatacaatgactacacagcaatagaaaaaactacttttacactcatgatacatagatctgaatgtattatgctaaaaaaattttttttagtcaaatgtactatgctaagtgaaagaaacagacttaaagctacatgctctgtggttccatttataggacattctagtaaaggcaaactaacagtgtttttcaggatctgggattaaagggatgacttattacaaaggaacacaaggaaacttcccagaatgatggacatctatatcttaattatagtagtttaacatgatgatataaatttgttaaaactcagtacactataccaagagaatgaatgttaatgtatgtaaattatgtctcagaaagctagacattaagaaaaaactaataaaaaatgcaattatgcaaataacttgttacaaaggaattataatgaatatgaatttgtaaacacaaatccaactgtagaacatcacaactcaattaaaaaattattgggatgcctgggtggctcaacgtttgagtatctgacttctgctcagggaatgatctcagagttccaggatcaagtcctacactgggctccctgcatgcagcttgcttctccctctgcctgtgtctctgcctctgtctctcatgaataaataaaatcttttaaaaaattatttaaaaatattcctttagaatattcatttaactcccactgggcatatgcatcattttgtaacacaccatggcattagcattaatatttatttcagtaaagtaattatttaaataaaaacactgcatacattaactttttcctgaaaccacttagtttctaaatgggctcaacgttttcatgtgccaagaaacaattttgtatcattcctttgtaataactgaataagacacatcactcctataaaaggaattaatttactactaatgccttcatggttataaatttttcaaacctctgtaataccatcatccacctattggtccattcaacttcagaaacctcatgaaaacagcagttaaacagcttttgttatattaaagaggtaggtgtgtgtttggaagtgagaggaagggtgaaatgatagctatttttattattattggtagtgagaacacaaaacagtcccaaactaaactccttctgagtacaattctctactttcaaagctggaacccattaaatagtttagattatattttaactccttttaaaagcagttctttttttccccccagttcagtatcacaataccactgaaaaaactgccactctcatgtgtatagtactaaaagtttataaatgcatttcacacatattatctcttaatcctcaccaaaacctatgagatagtgtgttaattttctttttgtaaatgtcaaaacccacttagaagattagattagttgtcgaaagattacacaaatgatttaagtgtcagggccagaacgctgttttgtattactctgtgtatacattagcaagaacaatctgaagacagagaacattataggaaagcttatacctaacaatgtctaaaaatattagcaatacttggtagtcactgcatatatacccctaacaatgtctaaaaatattaccaatacttgggagccactgcatatattaaaggagactgagtaaagaatagtttagtgacaactaaatgtggaatggaatcctggatggaaaaaaacaaaggccattacttgaacaagtggcagggatgcctgggtggctcagtggttgggcatctgcctttggctcagggcatgatcctggggtctggggatggagtcccacattgggcttcctacagaagcctgcttctctctctgcctatgtctctgcctcctctgtctctcatgaataaataaataaaattgtttttaaaaaacaatcaagtggcaaatacaagtgaacatggatgcatattagacaatactactgaattaatgtttaatttcctaaatttcttaaaaaagattttatttattcatgagagacacaaagagagagaggcagagacacaggcagagggagaagcaggctccatgcacggagcccaatgtgggactcgatcccaggactcctggaccacgccctgagccaaaggcagccgctcaactgctgagccacccaggtgtccctgatttcctaaatttgataactaatgtaatatgtaagagaaagtccttgttcttaggtaatacatattttaaatattcagggatgaaaggttatgatgcctgcaacttactgaaagtgattcaaaagaatatgtgtacagagaaatcaaatggcaaaaatgctaactggtgacctaaataaagattatacagtgctcaggggttttttttttgttgtttttttttagattttattttttattttaggcagagagcgagagagatcacatgggggagggaggctctctgctaagtaagctgagagcctgatgtggggcttgatcccaagatcctgagatcatgagctgagatgaaggcagccacttagctgactgagccaccctgtgtcccactcacagttacttttattactgaacttataagactgaaatttcaaaaaatagagatgaaaataaaaaaataaaacattaattttctttcaattttctttaatagctattagacatctctaaggggatcttttgttaaataactgaataaataaagatacattctcgcaggtgcctgggtggttcagtcagttaaacatctgccttcagctcaggtcatggtgataccagggttctggtattgagtcccagggacaggctctgtgctcagcagggagcctgcttctccctctccctctgccatttcccctgctgcgctctttcaaataaataaataaaatcttaaaaaaaaaaagaaagatactttctttttagtgcctgtataaacaagttaactctagttggaatcaaacagtatttgttgatttttaaaaaatagggtataaaacatgacagcaagcaatacataatacatctgaggaatagctcatacttttttgtggtatgagaattttagtaaaatttttctcccatcccattccaaaatatttaaatatgtttttataatcttcatacatttcaaaataagtactgtgaatctgcaccacatagatatttccattaattcaaccataagtcctccaggggaaaaaaacaacaacaggatttcaatagcatagacaccatttcactaaataaacatgccttccccaaggagcactaagcacaagtaggagaagggagctgtccagttacacatgcttttctccttgtattcatcttgccaagcttcattcctagtgtttaaagtatttttttgcaacaaatcccctaatgcaagccaacctcttcatctgatgctcaactaaagaaatttatttttaaagtttctgaaggaaaaaaaaaaaaaaaaagtttctgaaggaaaaattagctattttttgcacatctgggagatggaataaatgtataatataattcatgaacactttaagggagttttaggagtattttaacatcgattttttttgttatatgtgccaacttcacagcctaactccgtctgaacatgcaattccaacataaatgtactctatttcattatttatagcaagaacataacacttcaatgcaaagaggacttctttatacaggctacaattcagaaacagtcctctaactttctaggtcaactcatcttttttttagttactcctgagtcccccaaattgtacttttttctctggattattatttaacttgatttaacccaacttctacattcttcctactcacagaattaagagtgaaaagaaactcagaaatcagtccattattcctccctccaagctcacagagttgccggctagacaccggtaagttccatagaagaataaattccttatcctctaactaatacgaatttttacagaaaggtaatattaaattgtacatagaagctcagaaaagaaaaaagaaaaaaaaagttcagaagacacttataaagtgttctgaaaacgcagtgaaacaaagcacctcttcacttcgaatcctccatactaagttttgactactagtgagtagacagttttaatatttcttgatctctagaggaacataaggaaaatcccataaaattggggctcttccttacaatttattttttgtacaattagtttatttgctgtcatctcattctttgtccctaatgttttattaactctacttttaaataaaaacagacacaaaataaactatacagatttgaaaattattttttaaaaaactacaataaatttttcaagttctatttcaaactgtcaacctggatttttaaaaaatagagggcagaaaacaatttttcatttcagaatgaggtataaacatagaagggaccaatcttgcgattgtctgtctagtatcatcctaaattaagtcaaagatgcaaaacattttctgtgacatcaggatataattccctaaagcccacttcttcatagcatacactctttatgtttcttttaaaaggttactgcataatgacatgaggtttacactaaaatttaaaggaggcctttcagatctttgaatcaaagtcatgaatcaaagaatcatgatttaatgaccttaactgaagtgcaaaagctctttataaaatactaactaaataatgatgctgacacatactaaggaagcatttatttacttttttagcttgctcaattaagtgactaagtctgggctgaatgcaataaggctgacctgcaggggtcaaacccaggagttgtgttacaatcttttttccttaatcacagacttctttgataatctaataaatgctaaaaagcctcttctcagaaaattccctacatggacagagatacaaaattttgtttttttatttttcaagtatttttttatttaaataatctctacacccaatgtgggacttgaactcatgaccgtgagatgaagagtcacacacacttctgactcagccagccaggtgccccacttacaaaattttaatacaaccttgaagggaggtgtcattacacaatctattaatcccagggaaacaattatcattgattacatagaaagaaagagttaaaacttaatgctcttggtattcatacagattctgatcagaacaaggggaccagacaggcatctggagtcaaaggttggtgaaagctgtgataaccttccgttccaccgtaccaaaactattcaaaggccacagcagccaggttctgccaactgtccatccctgctctgtgatcccaagacacaaggccctgtgccatctctacctctaatcatctagattctgcaagctgctttgatctactgcagttgctgacaagtaactacccagtccaccctttaatacctttggtgacacaactcagcgtttcaaaagacaagccattgcagttttaggcaatgccgaaaaattatgaagttcctttctaatctgactaaaggggtttgtaaactttaaatgctgccctactgaatttcttctcttttcacttaccaataggtaacaaaatagcttatcattcagtatttgatactaatcctaaaaccagaagcaaaaaatcatagttctacttgcaccaaacagataagtcagaataatgatgaaaagcactttctacttgcaaatcaaaatggaagatcagtactggttcagttcgagaaaaatgcaaggtttccacctacacagcatctcctacttttcagggcttcttttcactgcataaaaaattttaaatgtatcaacattaaaagattcagagtacagtcaccaacattaaaagattcagagtacagtcacttaaattaacatcagttctgtctgcaaatagtattctctatatttctatttatacctgtgattctgtaataaacagttctaatcaatacaatataaatatagaagtcattacttatttatcagataaagcctggctttcaagaactttaagttgtctcagtcaccttcaatggctcctttttcacactaagaaatatctcatattgaaaccaatgtatcagtaaggtccagttatcatatatataagcaacctctgatgcaaatgcttgtttccttcaaaaagaaaggaaatattaaaaattatactttctattttcttccttaaataatcccacgctaatgctggaaaaaaaaaaaagattcacagatattacgaaaagtgatttatacagtcaaatcagataagaacaacgttaaccaacagttaattggattaccaatatagtaaaatctcatttacaaaggactacccgaggggggcttgctttcctgggccaagtctcagaaagccaaacaatgcacagccctaagaagagtctatcttgtaaggagcttctttttggtccttcaataattacaccacctatagagatacaaagatgatccacctaaatgaattctacactattctgcaaataccattatagggcaccagttccataaatttatatggtaggtttgcaacaatctcttggtaaagaaatacatttcctgataaataagcacttctctaattttccagagtggcttgaagaatgaaagccgtgttttaaaaaggcaataaataaataaatagatagatagataaataaataaataaatggcagtgccacacttcaccttaccacaactgcatgacctgcaaaaggcatgttaagctcatgaagacagacctctgagcctttctcttgtgataaactcatatttagaattattttagttgattcttaaatttgaaaatttcatgcatcacgagcaaaatattgtactacagaattttcttacagtccctattgttggataccctattatttaaatggattcagttttaaatcaatgcaatatatacttgtacccaagcaaatactatgaatctcgaattagtttaattatgcctgtttttttagcataaaattatttcatgagcttaatatacaattgaacactcgaaatagcttttttaaagcacagacttcagatagtccaaacactgccccacccctggtaagagtggttgactggaacattttaatacactccatcacgtatagtacggctatagaaccttcattattggcgcaagaagttgcacattttccagtacagtttattctttaaaaaaaatgtttgcatcatcctcaataccagatgtcaccaacactcaggtgcgctgaagatacgtgataaccacaagccctgtaatatcccccctctcaacataaatgcgcacttttgtcatttcttctaacgtgaagtcgctgaatgtaaaataataataataataataataataataataataataataataaggcgttctcgccagtaaccacacagttaggtctattaattgggaggcaggaatcacattaagaaaatttcaaacagtaacaacgcaaaacacaacacaaaggtgaaaggtcttttttgcttaattattgaaagatcttaccattttcaaaagtgtctgcgggatgccgagcaagagttccaaaacccacaccaatatttttccccatagcatctctctcagcatttttatcctgagaacccacgttaaaaactctttgtgaaggcatcttcacgcaaggtgctcgcaggtcatgaagactctaagaaatacattaaagccccgttcaggcttgtcaggcttgcttgttatctccatctgtccccaccacagagctcgcccgcgcaccgggcggaggagtgggatgtcccgtgtagatggtgtgtcacctaccactccgggacgggacatcattgtgtatagaagtcaggtgttcgacggcaggttctctgacttgctctcctgcttttatggacttgatgctccaaatacaagtcaacctctcaaatatgagcttttgctaattttcttttaatttactatgatgtcctcttttccctgagtagaaagatcttcctgacgttacaggcccagcttaaattatactccttctgtaaagatttctctaccactcannnnnnnnnnnnnnnnnnnnnnnnnnnnnnnnnnnnnnnnnnnnnnnnnnnnnnnnnnnnnnnnnnnnnnnnnnnnnnnnnnnnnnnnnnnnnnnnnnnnnnnnnnnnnnnnnnnnnnnnnnnnnnnnnnnnnnnnnnnnnnnnnnnnnnnnnnnnnnnnnnnnnctcgccgccctcgctccccctcaggtcccggctcggtcccggcccctcaccgcgcgctcctcgcgctcccggccgggggctcgcgcagcaacaagcacggcggcggcggcggctcgcggggcggcggcgcgcggtccccccgtcggccggcaaagcgctgcctcccggcgggagcgactaatggagtcccgtcgtcgcggcccctcgcccgtctgccggcgctccacccctccctccccgcctcctccgtccgagtccggccgcggctgggcgcgcctgctccctcctcccccgccccccgagccgcccggagcggtcgggccgcctcacccgagtccctcacggtcccccgcggccgcgctgcgggcaggggggggcaggggggcctcgcgcactcccgagctgggggcggggcgggcggggcggcgcgctccgaggtgccgggcgcggcgagggggaggcgaggggcgcccgcggcgcagcaatctcagccccgccgagccgctgcccttttatggaaatgaaggaccgggcgtagggattgaatccaacatccgggctctcggccgcgggacctgaggagggggagcgaggcgagcgggggcggcctcccgcgaggggaggggggcgcggcgcggcggggcggggcggggctgcggctttgcgggagcgcgtggcggtgggcgtccgtccttccagcgggagaaggggcttgtccgtgagaaacggtcacaggaaattcccagggcaaggtcgctttcagggaaccaagtccccccgccccccccccccccacgcctggagcgagtcccgaagactcggggcgggagtaggtgcggcgctccgggacctggagaggagggtctgggacgtggaaactggagaaagtgagtgcccaggccagctccacgaacatcccacaaaagaatgagaaaacccagagggaggtggaccgcaaaaatcgcctcgtaagcaacgtccggcacaaccagcaactcctaccggactcccaagagttcgcttgcgcttttaacccgttcggaggctccaagcagaagcgggtcagatacgccccccgacgctccgtgtttgcggggcgcagcacagccagtttgactcagaaacgttctccggccgctccagctctttgcatttgtgtatttttgtatgcaacttagaactaacagtcgactggggcttgtaggtggctaagcatcctctaccccaccctcagccacaccttgaaagaattttaatagctctgggatggtgccagcaggtagggagaaccacagggctctacctgttgagaccgaccagggatagaaaatggtcctcccgcttcccactttacttccacttcccccgtttactgtcgcactcgattcagaaagggccccccagagaacccgcctcgcagacgggcgggcagacgcagggctcaaaaaacttaggtccgcaagacagctaatcccaggtcccgcgaaagccccgggttttaaagtctccgtgttcttgagctgtgccaattactctgaaaaggaacttacgaggcaaataaccctccgttcctcaacgcagttgggaaacgaggttagaggcctcgagaaagggatgggacccataaaggagcgaaaggaaagcagcgaaattcagatgccagaggtttggcaccaaaaatagggaaaaccactaccgtacttggagctagtcatcatggagaaactgatgcctcggatctggcgtctgtccgctctccaattatttctactcatggaggtttcagagggttctcttggaagtggtatgaatgtcccagagaggagggaatatttgtgtaaattatggtgttgaaaatatacaggaaaacgttcttacaaaaatagggaattgcttgttagggtaaaaagctgtacaaaactgtgtatgtggctgtaacatcacaagcttatcctcaactattcagaggaagaaaaaaaaaaagactggaaggaaatacaccaaatgataagaagctgtgtgggtgttgagatcatgggagatttttcttcttcttcttcattttctacaaactccaaagctttgcattcaggacttctctgtcaccaccttaaattttattcaacatctcaatttctctgtgcatgccgttacattcacaatgatggacacagcgggtagagaagctactgaactactcggcaaagtgtccctttgtgttttttaatatccccccccctcccaattaaaacatgagctctttcaaagcagggacttaaatctttgtttttcccacaaatttataaatagcttgaaacaaaatggaaaacatgctgataccaaatcaatacaaatgtcaaagaaacagtaagtcacggagaaatctcattactagggaaatcctggcttttaaattttatgtgttatttccacatcttatctcaaaaagatttgtggcaatgtataagtattcatgggctatgagatagcatacattaggggtatagcacaaaattagggttagtggggagaggtgggaaatggaaggacagagatttaaaatggagccagaaatgaggctaaacattgtaccttaatgaactttgcaagtgtcccagtaaattccgagtaactattgcttctgaatatgcctccatagaaccaaaaatatccgtgttctttctgaatatgctgtccttcatacaaatttgtcaaagctgttttgtctcagaaacccttttagcacccagtttccacattctagttcttttctcactttccagtgagtactttctgaacagcctctcaccacagtgcctactgctttgactaatgcgcacttctgtgaatgttctttacatttagtgacagagggagatggttaataatgtaaataacagccccatttcttaacatttgaaatagcttagttatagcataataagagactttcctatcttgagaaaataagcagtttatatttgagcagtatagagcacaggaaggcagtgaccctctgttaagtaccattggaggaatagattaggatgggtgcagctggttccttcgggccttctttttgagtatttcaagctggtgcttgttttgaagatgaaagaggactctgactccaatcattgaaaccgggattttttttcccccggtttatcaagtgaggctttcaaatgcatttcttaaatgtttacttctacctaatgttttccagtgtattcagatgtggaatcttatctggaatcccccactagaacctctaagacaatgcaatacttgtggtactgacatcatgctgaaaagtagccgagaactccagtgtttggaagaacagcccaagcactgaaagcagcaatatccaaataaggtaccaagcactggtcttagatttagaccaaatgatacctcacagatctgccgtcaaatgcagcccttgggctgggtaatccacaggttgacttcggctttttctctgaccctacctaagctgtgcttttatatttctaaaaggttaatacaaaataaacccaccaggtttgaaagagagagatgttgggtgataggaaaaaataagagaaaaaaaaaaaaaggaaaaaataagagaaggtctgtgtgagtgcgaaagtgtaagggtaactaaaaatgcacttcaaaccaccatatgaggccagcaagatgaaatgtaatgaattattcctgtcaaataccaggtgaacagaattctttgtcccagggattgccaaaaatggaacatactggtaaagctactaaggaggtagaagtcaaaggacatggagtgtaaactaagaatgggaaggaaggctgcaggggccacagtttttatagaaacggtagtcactgcaaacagcaagaaaaggagtagcaaacctagggacaaagatgatttgctgggggtggggatgtttcgacatggacctaaaggagaactcttaaatagcaatgaaatctacttcaaggagaaagaaatgcactgctcaaatgtaccgctccagagtatagaaaatttttcgtaagaaaccatgctgggtgatacgtgaaaaaaactttttttctttgatttaattttgaacatcatgtcatcttgtaaacattctgtcctcgacaaaaatatggaggattcacacataggatcatacaaacaaggtagctaattgtgtgccttagaacagtacaaggcactgagacagatatgtagacatataacatatcacaaagtcttaaaggaacatctgatgtaggagacttatatttaaaatatcataaaggatatccacatgcaaaaaaattaggcccctacttacactatatataaaaattaactcaaaatgaatcacagacctaagtttaagatctaaacatagcattctcagaagaaaacataggagtaaacctttgtaaccatggattaggcaatagcttcttagataagacatcaaagccaaagcaacaaaagaaaaacaaaattgaattttctcaaaataaaaaatacctaaatttcaaaagagcatgaaaaatgtgaaaaaataacccacagaatgggaaaaatatttgtaaatcatatatttttaaggaacttatatctagaatatataaagagctactataaatcaacaataagacaactcaattaaaatgagcaaataggggtaccagggtggctcagtggttgagcagctgcctttggctcagggtgtgatcccagggttctgggatgagttccacatcaggcttcccacagggagcctgcttctccctctgcctatgtctctgcctctctgtatctcataaataaaatcctttaaaaaataataaataaaatgaacaaataatctgattagtcagttctccaaaaaggatacacaaatgatcaatgagcaatggaaaaatgctcaacaccattaggcatcaaggaattgcaaatcaaaatcacaatgagataacacttcatacccagcagaatgatataattagaaaaagacaataacaagtgctagctaggatatggagaaattgcagccctcatacattgctggtgggaatgtaaaatggtcaactattttgatatacaatttggcaattcctcagaaaattatagagctaccatataacccagcagttgtactcttagatatataccaagaaaattgaaaatatatgtccagacaaatacttgcacacaaatattaatacttagccaaaagatggaaacaacccaaatgttcatttatcacttgaaaaacatttgggatgtttccatcttttgtctagtactaatatttgtgtacaagtatttaaataaatgattcatttaaaaaatcagaagggggatgcctgggtggctcagtggttaagtgtctgtcttcagctcagggcatgatcctatggtcccgggattgagtctcgcagtggtctccctgcgaggagtctgcttctcctctacctgtgtctctgcctctctctctgtctctcatgaataaataaattaaatattttttagggcagacccggtggctcagtggtttagcgccacagtccctgcatggggcctgcttttccctgtgcctgtgtctctgcctctccctctctctgtgtctctcatgaataaataaattaaataaataaaattttaaaaaaataaaatattttttaaaaaattcagaaggtagagaaactataactctaacatctaaatcataaagtacaaacccactatgaagactatgataatctaacctctgaaagaaggtcatcagtgaagtcatggaatgtctttatgaagaagacaaatctaactggatctgaaggatggagttaggcctatcgggaggagtagtgtgtgaaatcacgaggcaaaagtaagcatggcatgcccaccgccatggagaagaaaggaagaaatgccaaggagatgctctggagaagagtgggggtagagtgaggccagagtaggtaggatagaagtttagattcggagaaaggaaatggtaagtcattaaaaagttgttacgtggtagtaatatcatgaaagcaatattcaaataagattaatccagtaaaaatatgcatgttggattgcaagagctagggactagaattcagaaggttggtttggaatctgctcatgacttacatgtaagaaaagtagggattgggggatggaggggatttcaaaagaattattatcaaaagcttttgagcatttttgatgttttaagagctgtttagtgcacttgaaacgttcctcacaacaaccctgagtttttatgattatccttctttaatgtgagttacctgatggctagagaactgggattaaaacctaggtctgaaaaaaagaaggtcataaatgctgcaaagttttcatgtttgggtgaccaagcaagacgaacaatggggttactgaactggagaatggagctagggaggaggtgatttcagggagcaaagggaagacaacatgttttaaaaaagaaatattcaacttagggtgaaagctgtataccccagtggaaacatttcaagggcaattaggtaaataaacctggccattttgtgagagtatcagatcacagagagaaatcatgaacagagaggcaagcctgaagagatggcttcactcccaaaggagcctaaccttggggtaactaactgttccccaaaggcagaagcaggaaggagaatcctctaaggcaacagaggtgaaaaaaagatcaggttagtccagagtcaggcaagccaaaaaaaaaggaaagaagtaaaaaaaaaaaaaaaaaaaagggaaaggaaagatgaaagaaccatttcaagaaggaaaagatggtcaacagtatcaaatgatgcagaggagttcaggagaataaagagtgattgaagaacacaaagcctggccaaaatcattgctcaccttgcagaggacaattttataactagttgagacaggtttcaaagagttgaagaagaaaaaggaagtttctcagtgaaaggaaagcaggaacgagtatagtagtatggaggtgccacaggagcaaaggtgctttttcaaaacaaaggacacaggagcgtgcataaagacttacggaaaagtcaagggggaaatagtttgcttaaacttaaaaccaagatctctctgggttttggggggataattgcccagattcaggagaaataggagcagcccttgccaccacagaagaaatacacaccagtttgctaggctattggtttactggaaggatctaactattttataaaagtggaaacacacagcaggatacagcaaattgtgtataaacatatttaaataaatactgttaatattagccaacgagagggtggggctggctgggttattgtgctgttcaacagaggccctcccaggaggtcagattggggccgggatgtaagaaaggaaggatgtgattaagagattatttcagtacaactagggcagagattccaaagcccatagggagaaccaatggggacagcacaaatgccaacgtgcccagcacagaggtgctgctgggggtccactggcctgagacagtgtagccaccattcgcaggtcactccaaaggacacaggccacgaggccatttccgacagctgccttcacgcagtcagttcctacaacataccagaaactctgacctgctcaactgtttgcctgttaatgaatacattagtcttcttcctgatttccaatgttattcagtgtccagcaggttcttcccaatttttagtaactaggtaaaccactgactcccaacccccatgctgtgaaaagatccctgttctctttgtgctttgtatcacaatgtcctcttcacatgcataaaccttctattcttcccaaaacaggatttgcagttccactaaaacagccaaaccagaaagtcacctacaactccaattgccctagggccaacccagtccaatttagaaggacaaaagtaccttttatctacttgctcctaagaaggtgctcaggtgacagagaattgacagcagctgaacatcaccatctggtgcctgggaggtgtcactgcaaatcttttctctcctttgaactgcatgcaacaaatatatatattttttaatactttatttatccattcatgagaaacacagagagagaggcagagacataggcagaaggagaagcaggttccatgcagggaatccgatgcaggactcgatccccagaccccaggatcatgacctgagccaaaggagaagctcaaacttctgagccacccaggcgtcctgcaacaaataattcattaagaacttaacaaatggagaaagcatccctgcacctattgaaagataaacttttggggcccctgggtggcccagttggttgagcgcctgcctttggctcaggtcatgatcctaggacattaggctcctggctcagcgagaggcccgcttctccctctgcctgctgctccccctacgtatgctctgtttctctctaataaatggataaaatctcaaaaaaaaaaaaaaaaaagtcagtaaaaataaaagataaactcttcatttttggaccccatcccctctttcaaggggtgcttttggaggtatccgctatattcccagtttttcctgcttcatctaattctccccttccttccatatcactgccattgctctataaacagactccagcacctccacttaaagaaaggaagatgagacgcctaggtggctcagaggttgggcgcctgtcttcggctcaggttgtgattctgagatctggcagcgagtccacatcaggctccttgcagggagcttctccctctgcctatgtctctgtctctgtctctgtctctgcctctctctgtctctcatgaataaataaataaatcttaaaaaaaaaaaaataaagagggcagcctgggtagctcagtggtttagcgctgccttcggcccagggcgtgatcctggagacccaggatcaagtcccacattgggctccctgcgtgggtcctgcttctccctctgcctgtgtctctacttctctctctctgtttctcattaataaataacatcttttaaaaaaataaagaaaggaagaaaaaggtctctcttgattacatgtatccctctgctaccccttcactgctatggtcccttagaatacaaaaccactcagatgagatatctgtatgtaacatctctacttcctcagccctatactactttttaacttacccccaaattggtctctgtttccaccactcccctgaaactgttcttaaagtcactaatgacctctgtgttgcaaaacacatagtgttgtctttctaaatgcttgctcctcttggagtttggaaattgccacatcctcattctttttttttttttaagattttatttatttattcataaaagacacacacagagagaggcagagacacaggcagagggagaagcaggaacaacaccactctctagccattcactcagcctgaaaaaaacaaaacaaaaacgaggcctcagcttaacgcccgcccccacctcactgtgactaatttaatgcctcctccagtgactaatttaatgtggaatccatctctgaaattgatccggcattgatccacttctctgcatctccaccatcaccaccctagtcctagccgctgtcttctcatttggattatttattcagcagccttctaagtggcctctctgctctctccctgtccagtccacttcctatacagtggctggagtgatcctttaaatgtataaatcacaacatttacttctctcttagaaacatcaagcgttttccatcaagcttaggataaaacccaaactccttacaatggctcaagaggcagcacaggatccgggccaacctacctggctgagcttctcctcactgtcttcagtcctagaagcttcctcccgcttgtgccttagcacttgcctttcccccctaccaccaagccctccccctggctcttcccaagaccctgtctttctctgacccaacatcatctcttcagaaaggccacatagcttataataacttttgtccccatcctcaagttactttctatttcatctgatcttttttcttccacaaaacttattaaaaatgtgaaattatcttatttgtttgtttgcttgtctccaccccacccagctgtcctctctgccattagaatctaaagctcctgcaagggagggaacttccaattgcattgtgatatgtctagctttggaacaccatcagtgttgcagtccatgtgagtggaggtccttgtagcagcctgccctcctctgccttgttcatagacatatcccccagcacctagtacagtgcctgccacatggcaagtgctcactagttgtgaaatgaatgaaagaataaaatgtagcttgccagatgatcctaggcacatatcccagatcagtgcctctaagaaacttaaactctagaaggtcattagaaccaagagtataaacatcacatataaatatttacatgtttcttagggccacatgcatatttagtagcatggtgcttctgatctccaagctgtaaacaagtgtatctgttcataggtactgcccttatcatcacacgaaaacagcccatttgagaaaatcatttgaatacaaggcatgaggtatttttccctcccaggattaaaaaaaaaaaaaaaatcaagggcacctgggtggctcagtctgttaagcatctgactcctagtttcagctcaggtcatgatctcagcatcatgagattgagctcctgtgttgggctctgtactgggcatggagcctgcttaggattctttttccctctaccccttaccaccctaaaaaaaaaaaaaaaaaatcattcttcaatcttctccactgtctttgaatagtcaaccctagccctttccaaactatactcactcctccctctcccatgacttcatctcctgcttccattgaacattgtagccatggggggtagaaactccttgacttatgctactgaacttttaatcctcctgcatctacacaaggtgccctctcctcctttgctgccattaggcagaagagatatctatgtttttatcaaaggttaatccacctgtgccttgctttccatttcttcctactctcaattaataaattctcaattatccatctccagggtcttcagactctctcaatccagagacttactgtcagcatttaaatatgctcaagtcttccccaacatttgaaaggctacatggaggacaggccatgaagtccaccccagacttcactggctccctagttgctgtcctccccttcatagatatcaaaacttctcaaaagcagattaagcattgtctttatactcactgtctccatttccatcccactctctcattattgaaccaatctcatccttgtttctgcctcctgttcaactgcagtgcctcttgttgggctcatgaattacctccatctcactaaatctgaaaggtgttttaaaccctcaccttaaacaaacaaaccaaccctcacctgatttgatttcttggcgattcataactccttcatccttgtctcctgtcacaccatattgtcttggtcttgcttcttctcacacccttttgctggcttatgttcctcatcttaaccatgatttttgaagtccttgaagttaagtctgaaccccttttgttcttattccacgaactctttttagggggcttacccacctgcatggctcgaacaccagctacatgtgaataattcccaaatttatcacaaacccaggactatctgactgttgtcaaaaactgacctctgtatgttggagcaaccacaagagactcttaatcatgggaaacaaactgagggttgcaggagaggggggtaggggggtggggtaactgggtgatggtcattaaggagggtgcatgatatcatgagcctgggtattatataagactgatgaatcacaaaaaaaaaaaaaataaaaataaaaataaaataaaataaaataaaataaaaataaaaaaaagtgatgaatcactaaactgtacctctgaaactaataatacattatatattaattaattgcatttaaacaaaatatatatttgttatttatttatttatttatttatttatttatgtcatgaagacagagtttgggataaagaggaacaatagctttattgcttcgctgggcaatggaggctgcagcaggctatggccttcaaaaaaactgcaagcccacccagaggaaggggtttggggatcttacagggaaatacaggatctagctggatttgacaagaattgtatacttgctgtcagcctcctttgtcaagtctttagggtggtactgggttcctgaagcaacaggctactgagggaggaggggaggtttgtgaaagagaggaagaggttactttaaaattgagcttcactgaagtattagtgcagccattctgacttttgttcaacattacacctttaagtggtttcatgagctctagggttgtatacctaattgctcattccaagtctccacctagatgtcctacatgaacctcaaactcaacctgcacataattgaactctgggtctttccttgtaggatggttctcaatccacctgcacagaccagacacttaacagtcatccgtgacacagtcttcacttctttcctcttcttaatccatcatcaaatcttattgattctttctcctacatatttatgagatccatctacttctctccacctctcctgccaccacttcagtgcaagccatcatggtctcccatctggctttgcaagagaaaccttataagggatctccatacctgtctttgcccctcctaatgttctcaatgctgtagcaggaatgaacatttaatgcaaatctgatcagtcactgtcccgttgaaagccattcaatacctttgcctttctcttagggaaaagacttaattccttaccatgcctccaaggctctgattgatctcttccccacacactttgcctgcctcatcttgttttactctctccctttcggcactaccttgcagttcctctaaccacacagactccatccagcctcaggggctttgtagaggatttcctttacctagacagttctactctctctctgaccctttgtctacttaccgactattatcctttagatattagtgtgtaacagatactgttgtgctctgccccagagctggtgtagagcagtagttttcaaagtgtggtccctgaaccaacagtatcagcatcacagggtaatctgttagaaatgcattctccagggcagccccggtggtgcagcggtttagcgccgcctgaagcctggggcgtgatcctggggaccccggatcgagtcccacgtcgggctccctgcatggagcctgcttctccctctgcctgtgtctctgcctctctctctctctctcaatctgtgcgtctctcatgaataaataaacaaaatctttaaaaaaaaaaaaaaaagaaagaaagaaatgcattctccagccccaccctagaatcaggaactctggagtggggtcctgcaatctgggttttatcaagtcctccaggtgatttggagatttgggaacccctgtcttatagtgtttatataagcttcctttgtctctctgcctgaggggaggctacaagtgctgagaattgaacacccctggggtgacccttacctagggagggatgggagttgctgggtaaatggcctagcctcataccccttagtaagacattcttaggaagattccacaaagtctctcagagagtcccctgtaggactgagccccaattccccacaggtgtaagttgctcattagtaattttcattccttcctttctttgtcccacttccttattcattcacagagctttctggaaccaacccttcaataggttgcttgtgcccaaatccttatcttaaggtctacttatggggcaaccagactaagacatgcaataaggataccccatgcgaaggaagatttaccccacccccgggctagaccagctcattctgttacctgtcctactgcacctgttttatctgcaatgcctaccagtgcctggcacaaacacagagaggcagtgagtgtttgttgaatgaatgacaatacatgaatagtaagaatcctttcatacataatttgccaaagggctatctgagaaattcttaggttttctgttatctacatttctttctttctttctttctttctttctttctttctttctttctttctttctttttttttttttttttgttatctacatttcaacatatttttctttgacatttcttctaggcttctcctctttcctatcataaatttccatttttttccatttcaagttcaggacaatagtcttttccacataatactacttgctgaaaaaaatactactactactttccattaattttgttggaatttatcttttaaagtatttcctttccaaccaaaacatttatccttctattcttcttctttttaagatctatctatctgtctatctatctgacagagagagcaagcaagcgaacacaagcagagggagagggagaaacagaatccccactgagcagggagcctgacatgggactcaatcccaggaccctaggatcatgacctcagcccaaggcagacacttaagtgattgagccagcgaggtgccccttgtccttctattctaactatagaattatatatagaattatatatacaattatattcttctgtaataggattttaaattttcaaatcataatattccttgacatccatccttaaaacctataaaggcttttcactgcgggctttccttggccttctcacttctaaaagaggtgaacatatgaacacatattgaataattttgcatctctgagatttaatcagccctcataaataatttagttttgtctgggagaaaatgtggatgagggcatctccccgtttttaccacacctgtaagtctttgcccatctctgttgcctgcaatgcctcaagagaggagtttgtagtttagagcccagattattcttttagactcttttgttaacaggtaagtttactgtacattaaagtttgcaccttggggtgcctgggtggcttagtcggttaagcatctgacttcagctcaggtcatgatcctggggtcaaacccagagttgggctgtctgctcagtggggagtctgcttttccctttccctctgcctctccccctgcttgtgctcttgctccttgctctctctctaataaataaataaaatcttaaaaaaaaaaaagtttgcacctatattcacttttgtgtgtgtgtgtgtgtgtgtggtaggtatatcacacctggggcaaactgactactttcctctctttcattccacatggcttccagagactcaggcctctcttacttgggggaaagaaatggcatctcacctagaccttcagcacaagctacattcttcaatccagccagagaccccttccctctttgtgggaagatgaagtgcttactctgctattaaagtagaactctgttctgcatttggctctttcttttcatgtggttaacccaactgagtatgcaggatggttggcggtgtgggatctgggcagtctgggtctctagttttatacacccaaaataggacccaaaccttatttcaaatctctaatcaaacacttgtttcttcaggaagtctgaataacaatttcaagcttatccctgaaactgagcatatgggttctgctttttggcagaatctttaaaataaataatagaaaagccccaataagccttctagtctgcctccccaaaaccagaccaggatcatttcctacattagacctgcctaatgtttcatctgatttaatttttaatattttggatgatgactttcacaatttccctgaggagaccatttcataatttaatatttatctctcagacagggagtgtttccagtaatcaacccaaattttaaaatctcatcttgttctcttagagattatttcctctctgtgaaaagttaaaaatttcaaatatggtattaatatacccataatttcccagtaggcaatctttagttccttcaaagaaattaatacccataaccatttgttcttattgtttttcagaacacctatatttttttcctatcattttattttctgtttgaccttatcttccacctgtggtctcattctggttttttagttgaaaattttttacagtgattcttttgtggtaaaatatatatacataacccaaaatttaacattttagctatttttaagtacagtgtagtagcattagatacattcacattgttgtgcaacccccatcccaccatctatctctagaactttttcatcttcccaaactgaaactctgtctccattaaacacgaactccccctttccccaaaacacagtccctggtaaccactcttttactttctgcctctacaaatttgactattctaggcactttataaatgttgattcttgtttttcaaaggaggtgacacatctctaatacgttgtggttttaaatgatcacaaaaacaacaataaccttattacagctatattaattcaaggatgatattcaaaatcttaatggctggttggcaatagcaggtgaagctgaggagattacgtggcgagcggtgcccatggagcggttctcatggtcaccggattcctcctctgccctgtgtctcatggaagatagaagtgtacgagaagtactacaaaagcatttcaatgtcaacaaaagcctgtggtcattacacatgctattggtctttcagttttggaaatctgtcttataattgcaatgaaacatttaaatgacacctatgaagaggaaccctttaattttcaaatggtctataacgaatttcagaagtttattcaaaggaaggcccattctgtttataattttgagaaacctgttgtcatgaaggcttttgaacacttacaacaattagaattaataaagcccatggaaaggacttcggtaaatacgcagagagagtaccagctgatgaaactacttttggataatactcaaattatgaatgctttgcagaaataccccaactgtcctacagatgttaggcagtgggcaacatcctcactaaactggttatgaatataatcagttcttcggttatagtttcgggcaatacttttctaaggaacccaaagctattgtcctttaacaagatatgttattacattttcttttttttttttttaagattccattcatttattcatgagaggcacagagagagagagagagagagagagagagagagagagaggcagagacataggcagagggagaagcaggctccctgcagggaacccgatacaggacttaatcccaggaccctgctatcatgacctgagccaaaggcagacgctcaaccactaagccacccaggcatctcatgttatttatttttagagagagagaaagagatagcccacgagcgacaagtgggaggggcagagagagagagaatcttaagcagggtccatgcttaagaccctgagatcatgatctgagccgaggtcaagagtcaggtgcttaaccgactgaaccacccaggtgacgtgaggttatcttattgaccagacagaaatcactatcaattttcaataaggcactatttaactttcttgaatctaggctctaatcaacaggaaatagtaaatcaaacattatatttcctagagaatcagacttattaggtagtcttgttagataatgctctaatattgaaagaacacatggtactttctacttcatttgtagattttggatactttttctttacagtgatgtgcagagagcatggcttctcaaatctcttcactatccttttgaagacatgtttgggatgatggaaaattcttcctgcccagaatgaggttcaacaggttgggagaaaaccttggtggggggctcactgagtttttttatatacccaatcatgtcaccctgaaactctggtataatggccttagatagttacaaagtctgcctttaacaagtcacaacattgagttctaacatttgggttccaggtacaatttcttacttgtcaccagtgccttaggaaaattccaagaacaatactgtgaatacccgtatttcctttgcgtagactcactaattgttagtatttgtaagtttgctttatctctttctctttctcacactcccacaaatggattttcttgaaccacttgaaagttaaatatagagcagcccgggtggctcagcggtttagtgctgccttcagcctaggcctaatcctggggacctgggatcgagtcccatgtcaggtccctgcatggagcctgcttctccctctgcctgtgtctctgccgctctctttctttccctctctctgtatctctcattaataaataaaaaaaaatcttaaaaaaaaagaaagttaaatatatatataattcattatgtataatatataatttatatgtatttatttaaattatatttaatttatatacttaatatataatttaatataaatatatttaaaataatttaaattatgtatataatatatatctatttatataatgaaattcagtcctaaatatagtcctaaaaacaagaactttttttttttttttgagcagatactgcaatgctttatctagatccccttcagggatgaagaacttactcctccatactttggtaggccactggcatagagctcttagctgttggtctcttctggaaattgtcctggttgaagagactgtgtaccccaaggccacatctgccgaacgccatctgcatctcataattgattgatgtggaggctctttcttttttttttttttttttttcggaggctctttcttgactcaggataagtcagaagggccttgctagctttagctccccaagggtttatgttgtggagactgcattgcagcctaaactttctctgcccatttctgctttttatttttctccttctattttcctctataggtattgatcccaacaacactacctaataaaattcctgcatactaatctccatttcagtcggcttcctaggaacctcaacctgttcaatgacagaagtggcttaagagaactaaaactaatatcaattttagtgacttatttcagaattttgtcatcatgaccactaaaaagtactttattctgtcagatttaaactctcctgtttcaacaatctccaagaaatactaatttaaaaaagcaagacacagaatgttgtacatcatgagctcccatcccaactgtgggggaaaaaagggtgggataacacacttatacctatgctcatatgtgcatagaatatctttgtaaggaaatataagaaacctgtagtagggttgcctctgggagagatcaagtgtctggggttgggaggcttacctctttttttactataagccctttgatattgttctaatttctaccatgcactctatgactttttttttttttttttttttttaaagctggaaacaaaataagacaaaatggtaatggttgctagtttggggtggaaggaatgtggttttattgtattggttgcaattttctgtagttttaaaaatgaaagttgcaggggcagcccaggttgctcagtgatttagcatggtgttcagcccagggcgtgatcctggagatccgggatcaagtcttgtgtcaggctccatgcctgcttctccctctgcctgtgtctatgcctctctctctgtgtctctcatgaataaataaataaaatctttaaaaaaaaattaaaattgctaaaaccagactcatctgttttaccgattttttttcttgtggacatagggaccatcctacttactgtaacacttcacttgggcagcccttatggctcagcgatttagcgccaccttcggcccagggcatgatcctggagacccaggatggagtcccacgtcaggcttcccgcatggagtttgcttttccctctgcctgtgtctcttcctatctctctctctgtgtctctcatgaataaataaataaaatcttaaaacaacaacaacaacaaacaaacaaacaaacaaaaaacacttcacttacttgtaaggggtaatcaaagaattcgttaaccttttcttctatgagttaacaacctgaattaatttaaattttcattgcagtaatttattatctgttgatttgatgatcatctttgtcacttttcttagaaccttaagcacattcgctacattgttttcaaagtataattatcgaaaccagatataatgctgtttaccaaagatctaaataatgcagatgatggagctgattttttattaatggcctaaccttacagaatcatgttcaactaatgctcagtgagatttttttattcaatgtgagcataatctgaaattttgattaatctattgggatttttttttttttagttttatttatttaagtaatctctacatctcaggtggaatttgaactcattaccctgagatcaagagttgcatgctctcctgactgagccagccggcacccctaatctgttgggttttttttttagtaagaaagcaaatgaggtccccagaactgtaggcccatactatcaagcttatcacacaaggcagtgcatatgagaatatattctttctgcgggcaggcagagacaaaagaagagagaagttgctgaggcaagtgtgcacgattctttcaaaactcatcatcgcactggtcagaccttgtcctatggtgcagaaagatgagggtagggaggataacaatttctacctcagagagttgctatggggtttaaatgtattaatacattgcaaatattaatgcatgttaaaatatttttatattcaacatatattctctaattataaaacataacatgtaataataagtatgttaagttatactaaaatgagataaattctattaaataaaattaaataggttaaattaaattaaatcaatactataaatatataaatattaatacatttaatattaattaaataaactgatatagacaaaacaaaagagagctaggcatatagtagatggtccataaatgttaggtatctttatttatttttccatctccagtacttattagatgtgtagtcaatgtttattcactcattcattcagtcatatgtccaagtatttattgacctgttagaggaatattgcttctgatccactcctctggtttctatagggaaagatctttccagcacacttggcctcttctcctacccctcattctgatcctggaggcagagtggcttacctggatggcaagtttgggaaaggctcttgagggtagtggtgggccatagtctggcctctttctcctttcctctcttggatacatattctgtccttcctctaggagatgagttctgtgagggtcttgttctatgggcatgtgcatacagcaaagactaggggagtgaggctacctgatttttttttaagactttatttatttattcatgagagacacacagagagaagcaaagatataggcagagggaggagaaacaggctctatgccgggagaccgatgtgggactcgatccgggactctgggatcatgccttgagccaaaggcagatgctcaacagctgagccaccccaggcgtccctggtttggggttttgtactggggataccaattttgctgtacacctaaacctcatttgtcaaccactttattgatcataaaactgatatattgatctccatctgattgtttcctccgtatcttctctctcagttggctctaaacctaggtagggaaaagagaagtctcacttatgaatgccccccttcaagctccaatattatttaacaaatatttttatggtaagtgctggggaagagatagtcaagatctgaagcatgaatcagagtaaactccaagaagatatggtcaagattcccaggttgaaggacaaaggccctgtggtaggggagacatacaaagaagagaactggaaagaaggctggggacctggctggagagaatgaggggaatatagatcaaatgagggctgagtcagcagggacacatatatcctcagagcagtggaaccatttgaaagccatttgagaactttgcattctgaatgattttttttggctgctctgtggaaaatggattgtaggaaacaaaaatggatgtgggttgatcagcaggagtcaaatccagaggatttttgctctctgcagggattgaaatgatgggagtagaaaacaagagaacagatttgaatgatatttaaaaggcaaacttgtcaaaacttggtactggattggatgtgggcaataagagagatggaagtgtcaaaataactcctgaattttcagcttgcataaccaaatgaatgaatgggaagtaccgttcaaaggcatcaggaacaaagaaagattaggttttgaaagagaatatgaattcagttttgacatgttgagtctgtggtgcctttgaaccatccaggaagagatgttaaggcattcaatatatggatctagagttcagaggagagagctgggctgaaaccatgtaatcatcagtcactgtgctatatatatatgccttctctcttccttgtccctctctctcctcaacccatctctcactttctctatgtagtaattagagtaatatatatacagtaattaaatggacttttcctctctccctctttccctccctcctgcctttcctcctgtatatgtagtaattaataggtgtacaaagtaattgaattaaaattgtgtgtagcaattaaagacagggagagacagatgagatcacctagggagaaagtgtagctggatggagaagagaagattgctcaacactgagccatgacctccaacaaatagaggtcaaatggagggggagcaacccacaaaacagactgagaagaagccacaaaatggaagaaaagtgggagagtgtggagtcaaggaaagaaaatgtccaaagagaatgcttggacacttcaaacattgaaatgtttgtgtagatcttcaattcagtgcagaagtgaagatctacaacaaatggctatgcatgatttatcctgatttttatcgctttttatcaagattttcagaggttgctttattcttaactcatacctatgctggaaaataccttacctctcacattctgtgtactcaacattcactgaacaccaactctatcaaaataccccagggtgaaagcctgaggctagtaggcagggcttcacaggggcaaataatagatggaaaacatgcagctaaaaaaaaaaaaattaaaaaaagaaaaaggaaaacatgaagctacaaagctggaaatctaataggctaccccagatgaacaggacgggaatggtgagagaaaatggtttacaagtattttctgttttacatgtaaacgtttgaattttctggggtgatgttgccccaaatgcttcaatacttatagcacttgagcatatatcctaggacagcagagtgacttcattaggggaagacatgaaacaagaaggcaatgttatggtgtgacagggacctgaagtgaagtaggcaggtggaaattcatcatcatccacctcttctgaatgtcatgatgacattttctaggaatatgagtaagaattgggcaccttgtttctcccttttgcttgtttttttggcccaaagttttttgctttttttaggggataatgagtgtctgccatcaacattctcttctgtatctatttgcagtcattaaaacaggaattctaaaaatcgatggtacagctagtcatatacttcctgaaagctgaaactttgttttgttcactgttataaccacaatgcgtggtgcaaagtaggggcttagtgagtatattgtctgtgaatgagtagatggatggatggacagatggatgaaaaagcaagtggagatcatctttactagttattatacaaacaggaaaatacattatcatctgaaacaagccacagaaactggcactctgccagcgacacaaatgtgaaatggcatgaagcacctgttaaagcctgccggatcccctcccttctgccttctgtttgcccaagctgtgcaaatggcagagcttgattaactcctccaccgatgtcacattggctaatgagaaggaagttcaccaaaccacagaaagggaagattcaatacaaaccttgcattcagtagattcttggtaaactttttgactcattcatgactatctgaacactatcaatgtgttcaaatctacagggcctgatgttttgcctttgggatatatcatggatcagtttaggtcactgtcatgctgctttgctcatggcagcttctaaggactaatgcattcctgaaaactggaaaaagtccaacttcatgtctttctgaatgaaggatgaaagggatgaccttgaaaattattaagctagcagcaataccctgaaaagtagtacaataaatcagcaaaatatcaatttagaaatgctgagaagagactaaaacataaggtatggttttacaataaatgatcctgtctgactcacctcatttccttctaggcagggggataagcctggttaaaggaaagagagcaataaattaaacaattttttaacctatcaaaaattttcatttgtcttacacaacaatttaaaatgaggaaaccatattgtggggagatatattggtaggaagattaaattctaagaagaatcattgtcaaccatataaaaaatgtatttcaaagggacttcaaagggttgatactggctctacattatcgaagatgtatttattgaacatttactatttttaaggcattgttctagatgctggagatgcaacactgaacaaaacaggctaaaatccttgccccatagaatagaaagtgtgggattagacgttacaattttagataaaatggctattggaagacttgaataaggtgtgagagaaagtcatgcaggtatttggggatgagcatttcatatgtgaaaattgcatacaataaggcccggaagcaaaagcatacttagctggtattttacattgaggcaacagtgggggtgaataggagttgaggtcagagaggtagcaggggccagatcaggacaatttactacttttagcaatgactactggttgtttggtgctgggtagctctttgtatttgtggggaacactccatcgtgtaagtctaggtagggagcagaacactctcatttccaacctttaaagtgggagggaccctctcctcactttctgatcaaagatggaactagtagagttggacaaatggttgttcttattcaggacttagaacaataagggaaagaattaaagcctcaggcccaagcccagtagcattgacagccccacagcctagtgtgtatagtgctagcaacagtgccctgagcagagcatccctgtggtgccactgtggatatgccttcccaccagccttccttagttttttgtccctgttctgtgtctagttctctgaactttctgtcttctgtaaacaacttgataagccaatgaaaattccctttctgctcaagagagccagaattgcttcttgtgccttggaactgaacatactgactgatacacatggaactcaggatataattcaaaacatccattcaagctaaagtgctgattaatcaaaagcaggcagacatacagggaaaaaacaaactaatactactaatactagattcattactcctgctcagaactgggatttatagaggataatcagctaacacataacaggtctatagagtgtggtagctcatgtttccaagggtgctgcagtggtatctcccatcctacatgctcttttgcattgtgaccttaccactcccctagtaactgggggatgtggaatatgtttcctctcctctttgttttggcaaatattttatttatcattttagagaaagatagacagcatgagtgagggggatagcatggagcccaacacaggcttgatctcatgaccctgagatcaggacctgagctgaaatcaagagtcagatgttcaactggctgagccacccaggtgcccctgtttcctctcctctttaatctgtgctgattctgggacctgttttgactaataaaatgtgacagaagtgatgcctaattcccaaggctgtgtcttcatcttggaagccatgtgagaagtctcatcactgctagacagaaaccagtggacagacacctgaaaacaacttgagcaatccagctccagtcaaactcccagctgaatggagccatatcagtgagcccaagcactgtcatctgaaacagaaggaccacccagctaatcccagttcaaattgttgacccacagaatcatgagcaaataaaatggctattgttttaaacagctaagttttggggctgcttgtcacacagcgttagatgacagaaacatataaatattgtcataaaataaatttttaattaagcaccaaattgcatgtggtttcagtcaagaggtacacaaagacaggtgtgtgtgtgtgtgtgcgtgtgcgtgcatgtgtatgtgtgtgtgtgtgtgtgtgagagagagagagagagctctgcccactgggcctaactctgtaatagatataactctcccaaacgaaagtaagaaattcagactgtgcaagaaaactgtggaagcaacatgtgaagatgtgaaaagttattactgtgtttagattagatataggatataacaagaatgtgtgtgtgtgtgtgtgtgtgtgtgtgcatgctcatacactagcatgggttgagggaagatcaaggaaatgtctgagaaaattgaagaagaaagaagaaaagggaaaacagtcaacagaaggactcatttttctcgtgggaccatatttgaacctaagacccactggaagtaaatttattaaactgacccctgttcaactattgatcacacaaactcttcatctaccatttcatccttcagtgtagagacatgattttactagtttggcttgctgatacatccccaaaggactggaactggacttgcctaataaatgcttattggaaatttgtggtaggaaataaacaaacacacatggaaatagcaatatcattttaaaattttacctaataaatatcagaaatgtaatagagtagttcatccatattagggtttccaaacagatgactagtgagatgggaagaggtagagtgagttggaaagagttccataaatctgcaaaatagatatgataccattaccagaaactcagaaagcgttataaaggctaaagttcaaaataaagccaaggtttgtgaaaactttccataacaaggctgtaaacctatatccttcagcaatggttccctctaatttaggtctctaattttatcttttcctttgggtttattttcttaaatcagaagatcttaaaactggaaagtataaaatatacgtgtaaagagataaagaaaataaagcattttgctccttctaaatgagtttagatcattaggctctacaaacacggtctggcagaggttggcctgacttcacggagtgtcctcagttggttctgcctcagagggcctggagacccatccttcctggatggagatgcatctggtcttacagatttattcttaagtctggacattatttaggctgagcagcttcataaaacaccacccacagtgccccccacacaccaccaccttgaggaaattagctcttacaagcctttggtaggtaggtctagtggtattcagtcggctctttgcaacccatcactgccctccagcagatgcagcaccagccatgcctgagggctctcctcacaggcaaccttgacaaccaggcacctaagaagggcagctggatgaaatcttcctttggccaaatggaacaccagcctctacagcagcaggtatgtacaggattaccatacagggaagcccacacaaaattcttttctgtaccagagtgcagtcagaaaaccccaactgacttctcagtctctggaatgagcaggatcttgacaccaatgcattatgccttctttcagcggactttggtgctcgggatacagatacacatgctgagtcctcccttgttttataaacctctgctgatacaatgcattagaataccaaataatattaaagtattactgatcatggggcacccgggtggctcagttggttaagtgtctgccttgagcttgggtcatgatttctgggtcctgggatcaagccctgcattggaaccccccactcagcagagaatctgcttctccctctccctctgactctcctctccacttgtgctctctctctatctcaaatgaataaataaaatctgaaaaaaataaagatcatcaaaagtaccaaaatgattgagctttttccccaggggaaccctgaatgctgctttgtccaaatgaccttggcaaaatctgcaaagtttacacatacactgcctggtctattgaaatgaactcatactgtgctatatcgtccaacattcttatggttaaatgcccagaagtgaactcataaagttaaataactttttcaggtcactgatctatggtctaaccttaatttatcctttagcaaatgtcatatgttagctggcccacagattaaatgttttttgaagtaaaatacaaagttaaaatgttaaaggaattatacataaatcatatggcatcaagattaaatgtacatcatttcaagcattatttgcaaaaaagattagaagtaactcaaaagtctatcaatgaaggtttagttaaagatactgtgatacatccaaatgtaggaatactatgcacctgtccaaaagaatgaggaggcaaggattgaacaggaagggaaaggtttccaaaacatggtaagttaaaaactgccaaaaaacaaaaagcaaaaaacctaagttcaaaaaagtatgtcatgctttggtaaagaagggcaaaatataaaaatatatatttgctatttgcttgtagatgtactgaacaactctggaactaagtatatgttaagaagagggacatatatggagtgtaggaactaattaatggagacgtgggttgagatgaagggagacattttactgtgtaactttttgtgtgttttggttttggcccatggcaatgtattacctattcagaaaaccaaattaaaaaaaaataaaattaaatatgtgcaacagcaaaacttcagtaattcaggtctatatattgggaatttgtggtgagttgaacatgttaaaggcaggggtgatgaaattatctcttcattccatgaggaagcgaggatacagacactctggaagggaaacaaggtttttcccccccaaatctccagctcttgtaaaagagtgatgggaacagaagagtagcatgcccctatcctcattccagctttatccaggtcccccacaggaatttcagtgcacatgcaagtgtttaacaaaagcctaaaactattagagccttatgcattcaacaaacatatattaaggacgtactgtggggatacagatgttaataattgtcaatccctgtctttaaaagaatcccaatccagcagccaggggttagatagtaaagtggtgtgatacaggtaggtagacacaatgtgatatgggcatagaggagggcctgatccaggccaggaaggtgtgtatgtgcgtgggtgggggtaggggtggggtaggggttggttgtagatgtcagggcaaaatgccccagcaggacaaaggtgaaagactaccaggagttaaatgaagaggaagatgggaggcgatccagagagagggcttgttatgtgtagagtcagaatccagattcttccagcttgaagggtaggaaaggaagatgggggaggaaatggcaatgatgatactggagaggagagagagaccagattatgaaagcctttgaatgtcgagctaaggattcaaattttgacctaaagtttaaggatacttacatcttaggtttgggttgtggacagaggtgaatctggagatgccatgaagctcaaggtacgactgaggagagagatgtaataatttgcatgggaattagtgcttgtggttgatattgaatgcccactcatttcagccaatgtgtataaaatttgttactattacttttgagagtgaagacagagcaaggttgtctcaatcagagtgttaacagcaaacagaaggcccactcaaagtgggatgattgttgaagggtttatttacagacagacaacacaaaggtgtgggcctggagtcactgcaaagaattctggagtaccatgggtcttatagcagcgtggctgacgatgtgtgcctaggtctgttatagacagaatgtctgcatcgcagcccccctaaattcacgtgtgaagctctaatccctaatgtgatggtattaggacatagagcctttgggaggtaatcgggcttatttatttattttatttaaatattttatttatttattcatgagagacacagacagagagaggcagagacataggcagagggagaagcaggttccatgcagggagcccgatgtgggactcgatcctggaccccgagatcacacccgaaagcagatgctcagctgctgagccaccaggcatcccggtaattgggtttagataaggtcatgcaggggtcatcatgatgaaatcagtgtgcttatgagaagggaccaaagaacattctctctctcattctctctgaggacacagcaggaaggcagccatctgcaagccaggaagagggatctcactggaacctgaccatgccagcagcctgatctcagacttcccagtctctagcactgtgagaaataaacttctgctgtttaggcacccaatctgtgggttttttttgtttttgtttttgttttttttggcagccaagctaagacaaagccaagcaggcaagggcaggaaactgctctttgaatctggaaggagtgagaccatcatgtaaactggcgattgagaagagcagtggactctggtcaggacctcacagggagcaaagcagcacaagaaatatcctgacctcccatttctccttccttctcttctccagatcctcagagggctgagaggcccagaatgtaggtcagtcttcagggactaaaagcaggacacagagaatagagcatgagtctaaaagggcaaatgacagaggcctggcacaaacatgataattaaatttccctccatttatcctgtcttgtgtgctcctcccaccccaaaaaagtaaaagagagtttttctatgagttaaaaaaggatgggatccctgggtggtgcagcggtttggccgcctgcctttggcccagggcgcgatcctggagacctgggatcgaatcccacgtcgggctccctgcatggagcctgcttctccctctgcctgtgtctctgcccccctctctctctctgtatgactatcataaataaaaaataaaaaaaataaaaggataactactctaaaaaatgtataatggctcaaatatcttacagcttgtttcttgttcacacagtggtgccaggtaaaccccactggtcggtggggtgcctcctcttgcagtcttttgagcaccagagctgatggagtctctgctgtctttagctggtagcttccaaggtagccctggtggtagtctgtgttccagccagctgcgaggggcaaagggcaagacagatcaaatgtgggaagttttagtgggccaggcctggcagtggcacaggagacttcagctgggactcagtcacagggctgttcctatctgcaaggaaggcggggacagtggtacagccatgcgcccaagaagaggagagcacggcaagaagcagctagcacccctgccatagtacagaaataatgtcctttagcaaaaattggtttgtactaataagctaacctctagatagaaccacactactcttaagagatttatgaagtttattgccccactcttcacagtgaaattttgcaaagagtgcaaatcactaaagacctgaattagccaagaatgtcacattttaatttcaaaatttatagctcctttattttacgttccttacaggaaagcctctctctacttccaatttatacctcttttttgatgatgatgtcatcctcccataatataggtgaatgagcccaaccagggtttcagttttgttctgttttgtttttaatattttatttacttatttgagagagagagagccaagcggagaggcagagggagagggagaagcagactccccattgagcagagagcctaatgtgggctcaatcctaggatcctgggatcgtgacctaagccaaagacagatgcctaacctactgagccacccaggcacccccagtcaggtttttgaaagttgctaaaagcacatcagaaatatacactgccaagaatcacagaagttgatcacatgagagggaagaatgattctgttcagatggcttggtatcattgtcatgctattgtaatatagtccatcatggatcccttaacaaaatggatcatctgtaagacttctgaactgtcctcttgaacctcccctatgtttccctgcatggtaattcactcctttcttgtgggctactgtgtgctattttttgtgtccatcacagggaattatacatcctcagtttcaagtctgtaaccatcttgagagcagattccctgccttgttgcttttatcctcagcttttcacacatcatggtgcttgtgcaggcaatacattggaatgaaagaaagaataaatgaatatcagtgagtataattttattttgggctgctgaaaatactttttgttttttgttccccgcccaaaaatacgttcttattgatggatgtaataatcgctatccttaaacttaacatttgtacatatgtctgtctcacatttctacctagaaaaaaaaataaccaaaatatggccagtgttctgggatcatttcctctctctctttttttttttaaagatttatttccctattttttacatttttaaaaagattttatttgggaaaaagagagagcaagagaaagtgaaagagagctacagagagtgagaaagagcacacgcagggggctgagaaggggagaagcagactccccactgagcagggagcctgatgcgggtctcgatcccaggaccctgggatcatgacctgagccaaaggcagatgcttaaccaactgagccacccagacaccgcaagatttattcccttcttttaaaagatgcaaatgtatcctaacaatccaaagttataaaaaaaaattaaataggtagaggaagacaagtctgatttgcaaaaagatttcaagcaccaaaatttcacaactgtttgccaaactgttattagtaatactgctattcttttctttaaatatattattttttaaatattttatttatttatttgagagtgggagaaagaacaagttggggggaaggggcagagggagagggagaagcagactccccactgggcagggaccccaatgcaggactcaatcctaggatcccgagatcatgacctgagccaaaggcaggtgcttaatccactgagccacccaggtgcctcttaaaatatccttaattgaggtatgattggcatacacaaaaagctggatatggttaatatatacatctttatgagtttgaaggtaagcactcacccctgaaaatgtcactataataaacaatgcataaacttaaccatcgcccctaaaagtttcctccctccctccttttctttttctttttttgtgataagaacatttaatttaagatctacctcttaacaagcttcaaatatacagtatactgttgtcaactatctgcattatactgtatactctaggactttttcatcttggaaaattgaaactatatatcctttgaccaataattgcccaattccccctcctccagcacctggtaatcatcactccactctgcttccatcagtgttctttatataaacaaattaatagtttcatagatatttaattttgattaagtaattgctggctaaactggagggtattatgctgagtgaaataagtcaattggagaaatcaattatcatatggtttctactcatgtgtggaatataaaaaatagtgaaagggaccctagggaaaggagggaaactgagtggggaaaaattggagaggaagacaaaccatgagagactcctgactcttggaaacaaacaaagggttgcagaaggggaagagcataggaaggaggggatagggtaactgggtgatgggcattaagaagggcacatgatgggatgagcagtgggtgttatactatatgttggaaaattgaatttaaataaaaaaaaaagtaatctttggctaaaagatacttttaactctgtggaaactacatcacagtttatagaagcaataggaatgccatgctattcttttttatatatatattttatttattcattcatgagagacatagagaggcagagagagaagtaggctccctaaggggagcccaatgtgagactcgatcccaggaccccaggatcaggccctgagcagaaggtagatgctcaaccgcttagccacccaggcgttgtgccatgctattgcttgtgccatgctttttgcttacgtacgtgttcaagaaagcaatgacacaagataaaacttcgaatagcacaaaggggtatatacttaaaaatatctctctactacctttgttctctcatcctagtggtaggcaccagagacatcaagtgaggctgtttcctgtatattctgagtttagacagaattctaatcatatgtaagttgtttttgaaaaattacacatgcaattacacaatatgattttaaagggcttttatttggcatgtaggattatgaaaaactctctgagttgttatttttatgtaagtcatagagatgatcctttttttttaagagagggagggggaggggcagaagaagagggaagagcctgactgagggcttaatctcacaatcctgaggttatgacctgagcagaaatcaagagtcagacccccagccaactgagcccccccaccacacccaggggccccacaatgacccttttaatagcatctataaggacctcatttgaaaaagggatagagagtgatgctatttcaggtaggaagatcacaagaagcctctctgatgagtagagacccgaatgagagaaggaggtggtcatgagaaaacaagtgcaaggttcttgcgattgttgtaaaaaaagatgtccatgaatgctcgatgctcttcaagaggtggaacttaactcccgtgcccttgggtgtgggctaaatttgaaataaatagatatggaagaagtggtggcatgttacttctgcaattaggttttaaggagattgcagcttctattctgggtgcccattttctcccatatcactctccccagtggaaggctctggccaggagagcggcttcaggctctgcagaaaggcctgtgtggtaaggagcagaggaactggccagtacctggccagcaaccaggaaagaactgaggtcctcagtccaaaaatccatggggctctgtggcctgccaacaaccttatgagtgagcttaggagattctcccctagttgagtcttcagatgagactgcagccacagccgtaagcttcactcttcccagaccttgatcagaaccacccagctaagccacgcccagtgttctaccctcaaaaaccacgagatataataaaaatttgttattttaagctgctaagttgttttatgaagcaacgtataattatttatgccccgaggctgcagctggcttgccaagttggagaaatagcaaggggcctaacgtggtgaaacaaagtgagcaggaatgggcacagtccatggtgaggtcagagaacaaacagagagtcctgtgagcagcgccaacagctctggctgctaatctgaaggaggtgagggtctagattgcagagttttgagtagaggagtgacatgataaaggatggacctgatgggacagatacttgggcagtggggagtgtgggagaccagtggggaggctgctgtcccaggaggctgcctacagtaatgagggtgtggtgatagtgctgagcactgactgggctccagtaggctttgctgttggagccagtcacagaggaaagaatggcacatttctgaagaggctggcctgtgccagaattaggataattccatgaaacttcaggggaaaagatgaagtgataaaattggtttccaaaatacctacctggcagctctcttctccggcctttgggctggctccttaaagtctcttgtcctcacacatgtttcttcatgttctttttcctcttctcctctctacctattaaaatctcctcccagggaagaatctatgaatttgttcccagtgaggtataaataattgatgagataaaaatcaatagcatttgtttatactagcaataagcaactggaaaatatgtaatagaataagatactttcacactagcaacaaaaactacaagatatctaggaattaaagaatatacttgagctgtagaaggaataattttaaactgtattaaaggacataaaagggaaggcctaagctggcttagataatggaaaatgtgactcttgatctcagggttgtgagttcgagctccacaactgggtgtagagattacttaaaagtaaaatctttttttaaaaaaaaggacacaggggatgcctgggtggctcagtggttgagcctctgccttcggcttggcgtgatctcagagtcccaggatcgagtcccacattgggctccctgcatggagtctgcttctccctctgactatgtctctgcctctctctctctctctctgtgtgtgtgtctctaatgaataaataaaaccctttaaaaaataagataaaaaataaaaataaacaaaggacacaaaagatctgaataaatgggaagatattccatgctcataaattgaataacttaaaaaaaaacttaaaaaaaataaattgaataacttaatattatgaaaatgaaggtctctccaaattaatctatagattgaatcttatcaaaatgccagggtttttgtttgtttgtttgttttttgagaaacactgaaaacttatttttaaacttatttggaaaaacaagtccatgatttagctaagtttcctttgaaaaagaaatacatagaggtgatatttaagacatactactaagctacgattgtacaaacatgaaacctattcaaggacaaaatggataatggaacggaataatagatggcttagggacagagctgtatttagattagaacttggtccccacatacaatgtaggaaatgatgcagctagagggaaaacagtaggaaaagatgtttactgaatgggaaaactggctcactacattgagaaaaataaaaccaaatccctaccaactgcatcaacaaatgttggctcccaaaggggtaaagatccattttcaagactatcatgaagttcctagaaaatatagaaatcattgtgatctatgtgtgaagaagggcttctgaaaatgcaaaaggcataaaccaagagaggaaaccaaatttgcttgacgttgttgaggttgcccttcctgctcctgctgtagccatggagtgcggaacctccaggtgacttgttttgatagtttaatctgggccaacacagcagctcttcagagggatccactctgctgacaggtaaatccacccccagagactaaggcatcactttccaacctctcatctgagatgtgcaaatgggatcccatctttgtcacttccagaaaatctataaatactaccccttcccagctacccaggcttggggaaatgcttagctccaagctcagccttgaaccaatggacttatttaaatcagtcctccatactaggtcccaagtgcaaaaactttttttcattgggagaaaaataataaggaccgcccccagatctttagagtcagcacacaacacattaagcatgaataatacaatgagtaattgaggagaaaaagagccctgatgtaacatttcctcttgccctccatcatagaaatgggttttgaaaatttagagaaatctttattccatccaggaccccgcttatttattcaaggtgccattctgatttcactttttatacttagtgcctcctaagggcctttggaattactctgagatctgtaaatgagtactggagtgtttcaattttggtactctcgagttgcagggatacatatattaagttgttggacaaggagaacccagctcctgcctcaagcatcccacaactctcagtggtggctgactgacaaagagacaaatgtggcaggaggtggtaagtctaaggaggtatgtgcaaatgtgatgttgtgggatgccacctgcttccttgagcatgacaattattacaaagctgagctttccctggatattgctgttgttctgtgttttgaagctgatcatacttttagatagtttaaaaccttagtttaactattataaccattagagcttactaaagtaattagcactagtcagttttgaacatcctcaaaaacaaatgattgtaatcaacctaacgtagatgttacaaaaaaaaaaaaagtgcccaaataataaaaagatgtgactttgaccaaattaggcaccatctttaattctgtactaattaggaaacttttgattgcaagcaacagcaagtccgactcagactggctttagaaataaggaagtgtgctaattcatgtaataggaactccaaagctatgacaggctcaacaatatcatcaaccacccagattttttctgcgtctcatcactgctatccacaggattcatctgaagcctggttccccttgtgtctctaatatggctgcccacaccaattttagctatgtgattccttgttcttatccactagatgagaaagcaagtaaaagtcctgatggaccaacttaattaatatgtcccctgctcccctggttcaggagctgtcaccaaagggattgctgtgtgctgtttggctcaaaccttgcttaccaaaccaaactctgccaaagtggggagaaggaattactgaaactggtttaggttaatcagagcacattccttgagcaggaatagaggggacagagtcattttccttcaaatcccatgggctgcatgagagagtattggatacctcaagaaagtctggattctcttgggaaggagagaaaggcaaatggatgtgaagtgggcaccccaaagtgacaacttcaaggcttgatctacagtatagaggaagggctgctggatgcagtatggatcagtgagggttggcaaagacatcagaagggatgtctgtggtgtgggcctcagacatattccccccacatggtgtgccatgagggagacttcaacatttccttgtaggaaattatgggaacaggggtgcctggtggctcagtcagttgagcatctgactcttggttttggctcaggtcatgatctcagggttgtgagactgagccctgtgtagagctccacggtcagcacagagtctacttgagattctatccctctgcccccaccccctgcttgtgtgtgcatatacacacatgtgctctccctctcaaataaataaatcttaaaaaaaaaaagaaagaaggaaatgatagcttaggctgggagtgcctgggtggctcagtgttaagtgtctgccttcagctcaggtcatgatcccagggtcctgaaatccagccctacattgggctctctgcttcctctccctctgcctgcttttccgtctacttgtgctctctctgtgtcaaataaataaaatctaaaaaaaaaaaaaaaaaaaaaaggatgcttagactggctgcagaaattttcaggtggctctgaggagcagcaggagaggtggagtttaatgaagacactcttgacgtatttgtaggaagcaatctgtcagtgaagttggtagggtaggggaaaaatacctgtgaattgtgaatagccccacatttgttgattgctgggaactgagtagtagagagggctaaagcatcacacacacacacacacacacacacacacacatatacatacacacacactattttttttaaagattttatttatttattcatgagagagagagagagaggcagagacataggcagagggagaagcaggctccacgcaaggagcctgatgtaggactcgatctggggactccaggatcacgccctgagccaaaggcaaatgcttaactgctgagccacccagacatccctacaattttgtgttacaaggaaccaggaagaatttttgccagctgagaacaaatattgctccttcagctaaacctcctacaaattgctcttcgaggaatacttcccttgtgtctggctctgccacttattagctgtataaccttggggacttgttgaacctctctgtacttcattttgctcttatgtaaaattaggataataatagtacataccttcctggggctgttgtgagtgctaagtaaattaatacatataaatcatttagaaaagtccttggaatttagtaagcacaatgtaccattatatatatgccaatatatgttatggacattttgaacagacttaaacctgtgaattgctgtggacagtgactttcgtacctcccaccatcttcctttttgaatgggagtgtttgttatcctttgcctctgttaggtgcatgggcaagtgacaggtcacattagtttcacaggtctgcagatggggagaattgcgctccaggaactggacctaatgagctatgtctgaggtacctgagccacacctggcctggtttagatgatgacattccagacttcaaagtgatgctgtaaggggatgagacttttggagaacattttgcttgtgaaagggacatgaatcactggccagagagcagacagactctaggatgaccccccagtgaatacccatatcatagtattcactcccttgtgtaattccctccctttgagtgtgcgtgggacctgtgactcaattctaaccaatagatggtggaatgtcacttctatctattagataagactggataagatggtaacttaaatcttgccagcagactccctcattgactctctcccttcctggctttgatgaagtgagctgtcatatagccaggaacttagagtggccttcagcagatagccagcaagaagttaggccctcagcctgacaacctacaaggaactgaatccttccaacagccatgtgatcttgccagcatgtccttctccagtcaagcctcagatgagaccccagcctcagctgacactttgactgcagctttgtgaaaggtcctcatgcagagaacccaactaacctgagtcccacagaaactgcaagggaataaaggtgtgttatttttgtcgctaaatttatggtgacttgttatgcagcaataaattactatataaacacatctgaaaacttaagtttccgataaaggtagcatttcagtttagttgggggggattgggtttttcagtaggtggttttggaacagctggatagccatctgaagaaagatatagatcataccagtacaataaattctgctggatcacagatttaactgctaaatgcaaaataatacatcttatatagaaaatatggggccaagttatcataatttcaggggaaatactattaaatgctaaactttctagatgctagaagttaaaaggtaacttcaacagcagaaaactaagaagagttctgtatgaaataaacactgtacttatagggagaagaaaaacaaattggaaaacaattttctctatatatacgttgacaaagggctattttccttaatacatagagttcaatgaatcagaaccatcagtacattagagaatgggcagagaacatagatcacagaatagtaaataccagtgcatcgcaaacataggtaaagatgctcagcctcacttgtaaaagagaccaaattagaattatgagatactatattttaactcctcaattggcaaagaaagttggataatcctgtgctgaggaataagggaaatagacacattcatgcatttgaatataaactggtataatatctcagaaggacaattaacaacatttcaaaatgtcaaaatacatggcacctgtattttgtctgtggagcatatgactctttttttctgttaaagattttatctattcatgaacgatatagagaaaggtagagacacaggcagagggagaagcagactccctatgggtagcccaaagcggaactcgatcccaggaccccgggatcataccctgagccaccaaaagcagatgctcaaccactgagccacccagatgctctggagtatgggactcttgatctaagttgtaaattggagacccacgttgggtatagagattacttaaaaataaaatcttgaaaaacaagtaacaaaatatcaaaacataacacagcaattctgcgtctagaaatttgatctgtatagagacctgcacatatattcaaagatactcactaaagcacagtttgtcttgggcaaggattgaagataactgtcatgtgtattaacagggtactgctaaatatctagggtactgttaaatgaacaaataaacaagggagttctgtttgtactgatatgaaacggcttccaaggttgttaaaaacaaagaatgaaacactgtgtaacatatgctatttgtacagaaatttacatatatcagacatgtttgtgcatgtaaagaacacttgtggaaaaatacacaagactcaagtaaacagtgcttgcttccactatgaagaaggaggtggccagggtgggccaagtaagagaggcatatagtcctcatccacaattttttgaatattttggatgaatatatgaatgtatcctctattcacagttattcataaaatagtataaaagaggcaatgttttgacaccaaggactctgatcaggatttaaaagacagtcatactttccggcagagagagcccgtgaatgccctctctgttggcaaaaaggagagaacgcccactacgtttttaaagtgcatcttaaaatagtgtattgcaaagctcactgggctcagccctttatgattgttggttagaggactgtcggggatcattttccaaaaaccaacttgcggccctctctattccagaagttgttttttttttttttctctttttttttctgtgaaaatgttcaagacttggagaatgtggctagaaaagctgggaactacccgtaaagcaggtggggaagcttcagagcagtggtcccatgcaccctgttcctggttgttgactttcctcattccagccagtgctgactttcctcattccagccagtgctgacgctcctctttcctgggtccagcctttgacatgagctctgcagctgcttccactgacccctcctcgctccctctccaagtctggaacagccctagctggcaccatggcagctgtgactcattgcaaatgctttgcattccgggatggtctgcagggtttgggtctcccctgtggctccaagcattaggcaagttgaaagggaggagaacaaggggccccacagctgccaaaacattgcaaggaagagggaggaattgttaggaaaattggaaaggtttttgtcccggcaggaccccagccagctgctccttggcttgggcctgcggtagcttgagccgggctgggggacatggtggaggcctacccaggggctcattgaagccccggtgaggcccattcacacatccagaagctctacccaccatctggagacatctctatctgtctgggaaggactgggttgaagccactttagaaagcagacatgggtctcattcagaagtgttttttttgtttcaaatattagtttacctttaattcactgggattattttgttagcttatttctcctcccctcctcctataactgtacacaatttattattttagctgtacacatttatattcaagtcaattgacatccttttttttttttttaaaagatcatttatttattcatgagacacacacatacaaaggcagagacataggcagagggagaaggaggctccatgcagagaacccggtgagggactggatcccaggaccctgggatcatgacctgagccaaaggcagatgctcaacccctgagccaccgaggtgccatgacatctattcttaaaatgttcgtgtttggatccctgggtggctcagcggttgagcatctgcctttggcccagggtgtgatcccggggtcccaggatcaagtcccacatcaggctacctgcatggagcctgcttctccctctgcctgtgtctctgcctctctctcactctgtcatgaataaaaaagtaaaatcttaaaaaaaaaaaaaaaaaagttagtgttcttttcctcaaagctttggaactctatgctgaaggctttctgtaaaaaagaaaaaaaaaaaaaaaaagccaagctacccaggttaatttaacagatgggtaggagttagggtaggtgagagccctgcccacacaccttcacctcatttcttccctgcttttctctctgcagactccaatgcaccataattaaaaaaaaaaaacaaacaaacaactttataacttaatcaactttattgaggcatatttacttataataaaatgtacccattttaagtatacagtttgatgaattttggcaatatccatggaaggcataatttgaaaacagtgggttagtagatataatgaaataaatgtacattttttaagggggagatcaacagtatttaatattcactatattatcctaactgcatgcatttacatcatcacatattaagcttcctttgctatcaaacaaataatgatagtcaatttagttttacttgtatttcatagaaggaaacaacttggatttaacacaaaacaaaattgaagtaaaagaattgctaaattctcgataaagttttcttctctatgagaaatattagcttctaaaatctctttttaggattcaggaggaattttgaaagtcacgtttttttttaaccttgacctcttctatatataagacaaagataacagacgataacgttctcacacctactcccatctgcatatccccttcctcttttatagtatttttatacagacatgtttggggcatcggcattctcacaacagtacaatagtttgtactggtctatattgaaatggttttggtattcacccagagcctcttatatggcttctccatcccccttctgtttttcttctaattttaattcttaatttccagcctatcattatgaagtttttttttttttttttttttttttttgagagatgctcatgggtgctgggtttcctttcattttcatgttttggaaagtctatctcctgaagtggcaacttcttttgttaagatattcttgagttaggagttagtcactgctccagtccagtcttttgccactgaattctgaggtcagtatgttctctgcagattatctgatactgtcaatctgaaagtgtgaataattccttacttttgagcttcagtaggtaggccaagatgggcctcagggttgggcagtccatgtggaatttttctggaatgcagtatgctctttaattcagcagatctgcttttgtttcagggacattctcttgggtagttttcatttgagtggtttactacttcagacaccacttgtcattacatgaggtcgcatttatctgatccccactatctacctcctttctactaactttagtctttagttctttttttttaatttgtattttatttttttgcaagatttattatgagaggcacaaagagaggcagagacataggcagaggtagaagcagactccctgtggggagccggatgcagggcttgatcccaggatcctgggatcataacctgagccaaaggcagagctcaaccagtgagccacccaggtgtccctagttcctttcttttttaaaacctgtgtttactgtggttatatctaacctctgctctatgttgtaattcaagttttagctgtttctctgttctttgctgtttttttccctagttttgtaattatgttgttttgtactcattttttttcaactcattctacttttttcttcttttatcacagggtatttgagctcatgttctatttaattcatgtccttaaaatgttttgtggaatcaagctgttgtaggcaattcccttgtttctagggtttttgaattggaccatttatctattaggtttgtgactgtttccctttctttgaattgttaaaaagccagtatgtttgtaaaatacctttgtaatttttttctcactctgctcacattctatctaaatttcctactttctatttgctttgagtcaggattctttttcctctataaatatatgaaactggtttgttccagtttgttttcctttctataccacggtctgagggctggaaatttggggtctttacatgttctgtaacttgaagtgatgacaagggatggaagagatatatatcagctaggcaatatgcagtcttacaagacttgtgctctgcttttctgaaatttggttaaatatcccttatcagttcttttttaccctgttggagtttgtatcctcttcttgggagtggtgggaggaatacctttaggattatttaacaatcagaattaaccatctaaactgggattaaataattagtaatgtggatagctcaagagcgttacttgacaattagttattgaaattcatggcatttggtgaagcacctccttgtttgattattgtaggtatttgtgttactcttttaaaaaagattttattttacagagagagagagagagaggacaagcagtgggagtggcagagggaggagcagattcccaatgagtagggagctcgaccctgtgatcatgacctaagctgaaggcagatgagtaactgagtcacccaagtgctggttttactttttttaaaaaactatatgttcatttcattgggcactgaggtattattttttacctggatttctctaatagcttgttttttaaaaattctaatgataattttcatattaaatactttcaaatttacagaactattataagaatagtcctctaagccatgtgggagggaactgccctagagcttacttccctcctgggataataaagagtctccttaaacacaatcatgtccaatgagataggaaaactgatttcttctttaatcatatttggtctattgagaatagtaataaaaattaaaaaaaaactagaaaaaataatactgtgaagttcaacagtttattctttaatgcgtattatcttcaagacatgaagaacgaaaactatgttttaaatctttgttgtctgactttactgtctccatacctctggtggctgctggacagaacacattaattaacagaactgaggggatccctgggtggctcagcagtttggcgcctgcctttggcccagggtatgatcctggagtcccgggatcaagtcccacgtcgggctccctgcatggagcctgcttctccctctgcctgtgtctcaacctctctctgtgtgtctcatgaataaataaataaaatctttaaaacaaaacaaaacaaaacaaaaaaacccaaaattgataggtttagtagattggtagataagggtacttactggtagagatctagtgtgtctagatttgtgcaaggcatctgataaaaccttccttaatacctgttatttaagggatgcctagatggctcagtggttgattgtctgcctttggctcaggttgtggtcctgggatcctgggattgagtcctgcatcgggttcctcacaaggagtctgcttatccctctgcctatgtctctgtctctctctgtgtgtctctcacaaataaataaaatcttaaaaaataaataacaaaaagcccgttatttaagtggcaggatagaggtgtgtgtaccgggtgatcagattaggcaagtaggaggaccacagctggttagacaaccatttcctggagatcaatgtgtggtcctccaaccacagggaagcctggtcacaatgcttccttctgacactctcctgtgtaatcctttgagtgtggagaaacacaaaaactagcttacaaagtctgtagcagcagcaacctgggaatgaaaactgactagatgacagaatcattctttgaaggttattatttgcaagtaatgaacccaagttaatgaaatgaaaatgtatgcataatagatatttataatttgggttgcctagcatctaaaagcttttcctatttgggaggaatcctaagataatgataaggaagcagctacctctttgactacagaaactaaaagggcagctatccccctgggagcacaagcaaggacaagacctaagacacctaatcaaatgctgccacgtgggactttgtatcctgaagggtaatgacacggctcaggtcaattaggtgtgctcagggtggctctgcaggggaaaagttaggggtgtgtgtggtctagaagaatgaggtgcatgtctagacagcagaatgcagcacaggagtggtaggtgtccagtggtggtgaggccagtcttggggcagtgactacctactggcaagtggcacattctgagcagcctgctcctgtggtgaaaactcagctgggccttacttcccttggctcctcctgtctttctcggagccacaggaatcaaaatacatcccattgctgcttaaggaatcatagttgtcttctgttttataatcaaaaaccttgttgagtataacatatctgagctcaggatccaaaaatcaactaagaagagctggatacttggcagttcatgtgacaaagacatagtgaactgtgacataataggtatcaatcaatcaatcaatcaatcaatcaaaataaaaaataaaaaataaaatagcgtggctgccagagtgctacaatggacagggcaaagacaatcagagatcatattactcaatattctgcttttgttaactatcactagagtgtattttgctgttccaactattttcttttaaggccaatggggacagactgaaatatgtatggtagaagagtgaccaggaggttgatgagtctttgtatgaggagctggagaaatttaacttagaaaagccacagggaggggcagcctgggtggctcagcagttttagtgccctcttcagcccagggcatgatcctagagacctgggatcgagtctcacgtcaggttccctgcatggagcctgcttctccctctgcctgtgtctctgcccttctctctctctctctctctgtctctctcatgaataaataagtaaaatcttatatatataaaaaaagccacagggaagacattctgggattctttccaattatgttgctgagataattttataaaaatctaatgataaagacagatgcaaaatgaactaaaaaataaaaatgttccccaaccagcattaagctctgtgtatatatcacaaaaggtgagagaaagtaagggctgagaattttcagatgggacaaggataagaagtgaatgttgtttcttcttctatcactagtagaatgagcattggagggaccattttccaggctccagttagactaacacctttctcctgggcacttccccctttttaaaaagattttattcatttgatagagagagaggagagagagagagagagagagagattgagacagcacaagcaggaggagcagcagagggagaagtaggctctttgctgatcagggagcctgatggagggctcaatcccaggaccttgggatcatgacctgagccaaaggcagatgtgtaactgattgagccacccaagtgcccttctcttgggggcccttattcacagggtgtagatatcttttacttcaacagtgttcctaaactattgttccagagacttcagatgactcaccttttccactgtagaagaaaatacaagatctaaatgtactgaaatattccaaagatatcctgttgtatactatcatagtcttgcttgcctcctggtttctcatgtctcaaatgagtagcaagcctcaaaccctgttctttcctgtagtttcataataaatctaaggctgctttcatcatcagtgttcctggggataatgttgattattttgaattaactatttcaagtatgaaataaatgttatatatgagtatattacctgcatatttcttccaacttttatgtggaattgtcagaattaaataattacattttttgagaaattaaaacctctgaaggtaattaaactctcttgtaagctttatgcaaactggttctaccctcctaggatcccctggcatcaagaattgagagaggttaggaggaaatgaggcctccccaccttcaactcttcttggcacagcacccggaaccaagtcttctccccaggaatacaatcaggggattcaatactggcagggtttagagagtcaaacaagagctccattcaggctcctgagggttgctacaagtaatactgctgtgaatatcctgctggggacggagcatgcatattaaccagcttaacttttgttccttgtttttagagctatggcaaatgatctggatttagccattcctcttttcctctgtcctgccttacaacacatatatctctctgcaaagtctgattgagactagaagagcaatccgtaccaacagaacacggtgtgaactcctaggggtgagaggctggggagatagggagaggaggaggtatggtttatcaagtattctctctctagcacctaggacagtcaaagcacgcattaaaggactgctggattgaagtgaactaaaaggaatggaactacttggctcataataccaaaaccacacatagacaaggaatacgtgctaggtatctaaacaaattaatagagaaagaaaattttgcgcacagagaaaagctggggatgtatttttccttgatttccttgacctatggcataatcatttattaagaaataaaggaacagaggactgccatcttaaagaaagtcaataaaaacagcatccttttaactcctagtgtattagggtttgtttcttaggaaaaatgaattgtcaacaattctaaaatcaaaaatcgcaagacagttatcgtgatatttacctagaagaaaacaagaattaaagacttcatttatcctctctaaagtttaattctctctctctctctcttttataattatttatatgggggggagcaatagaaatggcatatcactttttatttattttatttaaacagtttcctaaattctacctatgcaggaattggcattattacactcaatacagtaaaaagaaggaatgcataatgaattagaaagacaaaaggtagtactggtaaataaatccaaaaaccaacaaaattaataatccattttctttttaatggagaaagcacacagactaaaaataggaaatggaggggtgcctgggtgactcagttggttacgtgtcctcctttggctagggttgtgatgggatcaagccctgagttgggctttctgttcagcggggagtttgcttctctctctccctgcagctcccccggcttgtgctctgtcaaataaataaatacaaatcttaaaaaaaaaaaaaggaaatggaaatggattaataatcacacacgtgggagaaattaaaagaattctaaaagttgattttgctcagccctatgcaaataaatacacaatatggatgaatttctagtgaaatattaattgccaatattgtccccagaagagacaatcaaaacagcaattactgagacaaatgttgagacttgttaacctccttaccgagagtaaacaactaaataatgccctggtcacagttgattttactagtaaattctacccactttgggcagccctggttggcgcagcggtttggagtcacctgcagcctggggtgtgattctggagacctgggatcgagtctcacgtggagcctgcttccctctgcctgtgtctctgcctctttctctctgtgtctatgaataaataaaatctttaataaataaataaataaataaaataaacaggtattttgtgaatgtagttggaggggcccagggcaggctgcaacagcatagtgattactttgaattgaatctatttgggaaacaaacaggacaaggacactcagaacttcttttgtctccctgaaagcagaaaacaaatctcccatatgaaaaatagcctccctgtactcagaggtaaaaagacatccttatcaacataaatagaggaataaagttgagaatgctataaaataagccttgctatttttttcactaattcactttctcaggctaaattctgcttagaatttactaattaaagctcccaaacttacctgtttattccgcaaaaatctatcatcctttgtctaaaatgtataaacactgggatgcctgggtggttcagtggttgagtgttcgcctttggctcagggaatggttctagggtcctgagatggagtcccacgttggacttccctgcatggagcctgtttcttcctctgcctgtgtctctgcctttctttctgtgtgtctctcatgcataaataaaatcttttaaaaaataaaaataaaaagtataaaaattgcctgccttggtcatttctttgggtctcaatttcattatgggggcatctgtttgcatgtaacaaaattttgtttttttcttctttaatctgtctcgggtaaatttaattcttagtccagctagaaggcctcgaggatagacaaagaattttccctcaccgttaaagtcaatggaatagattacagaatccagaaatagacttgtgaagaattttagcacaacgaaagtggcattttaattgaataggacaaggattgattattcaatacaaaaaggctggacagttaattgagtgactatgtaaaaaaacaaaacaaaacacaaattccttctatatctcaaaataaatttgagatcaacagatttaaatggtaacaaatgaatccctgagagtactagaaaaaaccatggaaacatttttatgagtaaattctttttttttttaatttttatttatttattcatgagagacagagagagagaggcagagacacaggcagagggagaagcaggctccatgcaggaagcccgatgtgggactcgatcctagaccctgggatcaggccctgagccaaaggcagacgctcaaccgctaagccacccaggcatcccttatgaataaattctttggaagaattttgggagttctttggaggaagcaagtattttaaagatctcagaagaaatgagaggtcttaaaaagccaaatttcctgaccaagagtttgagattgggttaggtgaaacctctgaaattctctccttagaagaaggagtggggaattccaagtactccccttgtgcctgcttagtgctgttgaggtaataagtgtattggcttatttcacaatctcactgtgcaaatcttgagtggagggaggaggtatagcctagatgtcagcgggattaccttctcctttgaaattagctggagcctcttgaattctcccttaaagaaatctgggtaatttatgtattttccaatccccttggcatttggaaattaatttcatttatctactgttttgcctaaccctgtgctgttagtattgtgcattgctttgtccccaagtgtggaatagccctccttccccttatattaacattcataaaagggatttacgtatggagcagactttacagaagtttgcttggtttccctttccctttgacacgctgtttgcatcttttcaccttaaatttaccaggactcttgtggctctttatgtattaactccgttctctttgcatgcagaactattttgatcttttccaggcttgcctttgcatatcccaaaactcacgggtatgttttgcaaaacaatgctcatgaacctcgagcctgccagtggtagtagtgctagcaaagacttttctttttggcctctatgtgaagtagggggctgatatttctactattgtccttagaaggcagaagtggctgcagttttgatcttacataatctgctttttcttcctcataaaatggaccagatttcatagccatcagagttacatttgctcctttgactaacattaatcactacataaaagaaacattccaaaggtaaaacaatacaaaatgacaaactcatttatggagttcctaggtcctgtgagaaagtgctcaaagtcccattaagcatatttgaatactattcctaaaatgtttagaccattcaaaaggcaggattcatgggcaagcattatgatttttaaatttactggttatttggctgacttgaagctacgtcagggccatcagttactgaaactctttcagaacactgagacagatagttaaattgtccttttaagagattctgaccctttattcctctaaatgtctgggtaagacatttctttcccgtttcttacattctaaattttccagtgtccacctctggaataataatcttatttatattgttcaacactctgaacagaataagaagcatttatattctgtggtatttagactgtggtatataaatttatcagaggttatttttcatattattttatttctgctatcagtgttatattgtttgttgtttcttaaaaaataaaaagccccagattttcgggtcagtaatttatgggcacaattttaaaaagtcaaaagacacaaatgactatatataactaaaagtgagtctcttccgctctgtccctcactaattctcttttgcagagaaaaccactaggattagtttcctttctgaaagatatactatctcccttcccccaagtatacattctatacactctacattccacattctatacatactgctctgcattttggtcttcacttaaccttacagcttaggaattgttccatatctgcacaaacaggattgtcttatctttatctttaagctgcacatcattccactttatgaaggtatcatcattcatttagctaatctgtcaatggacacttacattgcttctaatttttagttctcattaacatttctgccatcaattaccttatatgtaggtcattttgcatataagagaatatttgaagggtaaattagtaaaagcaagggtaaatattctcaattttgatagctattgccaattgccctccaaaggggtcatgtctattcatgtttccactagcaaatgtttgaaaatacctgtttgctactgacctgaccattagagcatgttttttttttttttttctgtcaatcttatagatgaaaagtgtaacttttagactcttctcactgaatgattcaaaatgccttctttatcatatactaaatttttctgatgcatttctgggctttctggtttattccattggcctctcttgtctcttcatatgctattactacagtttttaaaaaatattttatttatttattcttgagagacacagagagagggagaggcagagacacaggtagagggagaagcaggctccatgcagggagcctgatatgggactcgatcccaggtctccaggatcacaccctgggctgaaggcagcgctaaaccactgagccacccaggtggccctacagtttttttttttttttttttaaagattttatttatttattcatgagagacacagagagaggcagagggagaagcaggctccatgcagggagccccatgtgggacttgatcctgggaccccaggatcatgccctgaaccaaaggcagacactcaaccgctgagccaccctggcatccccatccctacagttttgatcacagtagctttatatcatgttttactttatagtagatctagtcacctttattgctcttcttttccctaagaaatttcctggctgttttttttttttttttcctacatgaatttgaaaaattgttttgcttaaaaaaaaaaatcctgctgcatttttgagattgtattacattaatttatttagagacactactactttttaaagtttatcattgcaggcttaccatttcttaccagtatcttttgggttatgtcttcctgatgctcataaccatgtcttacataaaatattttcttattaattcttcatagcatttttgaaaatagcagggaagatagaagataaagagattagcctaggattacatatgataaagagccttaatacagtgttttatctactatttggtaatgcctcaccagtagattttacacaaattcaaaaacaaaacaaacttttctaccaaggattaaattttcctgttgcaaaaaaaccagcaatgtgcaagaacaattctgcaatatatttctgtgtgatgatctgtggccaagcacagaatgcattcctatcatggagtaacaatttcaaaagaattttgaaaccagagttggcttggatgctatacaatgacacccaggatgttggcctacttcccagatttcccctttttggttttctagcaagttggttgtgcctgggaatttgctgaatatggtacttggatccgtgacttcctgaatgtgacactaggatcaatggcatttgtctgcccaagggtttttggagtataatttctagacatactgcagttgtaaataagtcctttattgaaccggtgctcagttgcaagggtgtagataggaagggcaatgtatgaattgattatagaaggcaaagatcttgagagatgttctcttgtgaatattgagttacatacctgggcatactggtgttccagctggaggatcttcaagtccttaaataaatatttaatggatttaaaagctgtctttcatgccacatttgacaaatagccacttactaaaggtcaggcaagacttgataaatagttgattatctgcagcacctcctaccatcaccctggctcagttaacatgcagagagctgacaaagggcttgcatgggttactgaattacttaggacacacaagcatgtgttgacatatatctgagtatatttttggattacatttccaaaacaattaccgttttcatcattttgtttcagtcagcactattctcctcaatgccatgtataattatgagctgacttatgtaaaatattttaaaaatgtatagtagtatgatatacatacctagataacgtctgagattatttgccaccacgtacatgagaacattctttggcttggctctctaaaacaaagactactgtgttctaaactagaatgttatgcaagaatctgaatagcatagtttactgaatgctcagcctgtttagtgacataccaaagagtaggacaaaggctaaaagcaaaaacatggggcaagttttaagcaatgaacttaaaggtatatggatggtgaaatatttaattatcaaggcctcagagaccaggttgtaaaatctagctaatgaaag

SEQ ID NO: 3 - DNA, 9 bp, Canine spp.
aaggagaaa

SEQ ID NO: 4 - DNA, 7 bp, Canine spp.
aggcaag

SEQ ID NO: 5 - DNA, 11 bp, Canine spp.
gcaggagggga

SEQ ID NO: 6 - DNA, 13 bp, Canine spp.
aaaacaggaagag

SEQ ID NO: 7 - DNA, 9 bp, Canine spp.
agaaagcga

SEQ ID NO: 8 - DNA, 22 bp, Canine spp.
aaggagaaagagagaatggaca

SEQ ID NO: 9 - DNA, 15 bp, Canine spp.
gaagagaaggacaga

SEQ ID NO: 10 - DNA, 23 bp, Canine spp.
ggaacaggaaaagagagggcgaa

SEQ ID NO: 11 - DNA, 16 bp, Canine spp.
cgggaaaaggggaggc

SEQ ID NO: 12 - DNA, 2 bp, Canine spp.
ag

SEQ ID NO: 13 - DNA, 6 bp, Canine spp.
aaaaag

SEQ ID NO: 14 - DNA, 6 bp, Canine spp.
aggaga

SEQ ID NO: 15 - DNA, 2 bp, Canine spp.
ag

SEQ ID NO: 16 - DNA, 14 bp, Canine spp.
aataaaagagacga

SEQ ID NO: 17 - DNA, 5 bp, Canine spp.
ggagg

SEQ ID NO: 18 - DNA, 6 bp, Canine spp.
gcaaag

SEQ ID NO: 19 - DNA, 11 bp, Canine spp.
ggcgagcaaaa

SEQ ID NO: 20 - DNA, 8 bp, Canine spp.
atgaaccg

SEQ ID NO: 21 - DNA, 4 bp, Canine spp.
ggca

SEQ ID NO: 22 - DNA, 6 bp, Canine spp.
gaaggg

SEQ ID NO: 23 - DNA, 2 bp, Canine spp.
ag

SEQ ID NO: 24 - DNA, 4 bp, Canine spp.
ggag

SEQ ID NO: 25 - DNA, 4 bp, Canine spp.
agaa
